(19) United States
(12) Patent Application Publication
(10) Pub. No.: US 2021/0386788 A1
(43) Pub. Date: Dec. 16, 2021

(54) ER TUNABLE PROTEIN REGULATION

(71) Applicant: Obsidian Therapeutics, Inc., Cambridge, MA (US)

(72) Inventors: Vipin SURI, Belmont, MA (US); Dexue SUN, Cambridge, MA (US); Michelle Lynn OLS, Northborough, MA (US); Scott Francis HELLER, Stoughton, MA (US); Dan Jun LI, Cambridge, MA (US); Celeste RICHARDSON, Brookline, MA (US); Mara Christine INNISS, Beverly, MA (US); Jennifer Leah GORI, Jamaica Plain, MA (US); Benjamin J. PRIMACK, Brookline, MA (US); Abhishek KULKARNI, Brookline, MA (US); Brian DOLINSKI, Cambridge, MA (US); Tucker Read EZELL, Cambridge, MA (US); Michael SCHEBESTA, Cambridge, MA (US); James A. STORER, Medford, MA (US); Kutlu Goksu ELPEK, Arlington, MA (US)

(73) Assignee: Obsidian Therapeutics, Inc., Cambridge, MA (US)

(21) Appl. No.: 17/288,373

(22) PCT Filed: Oct. 23, 2019
(86) PCT No.: PCT/US2019/057698

§ 371 Date: Apr. 23, 2021

Related U.S. Application Data
(60) Provisional application No. 62/860,368, filed on Jun. 12, 2019.
(60) Provisional application No. 62/749,763, filed on Oct. 24, 2018.

(51) Int. Cl. A61K 35/28; A61K 31/4535; A61K 31/55; C07K 14/705; C07K 16/28; C07K 14/725; C07K 14/54; C07K 14/715; A61P 35/00

(52) U.S. Cl. CPC A61K 35/28; A61K 31/4535; A61K 31/55; C07K 14/70517; C07K 14/70578; A61P 35/00; C07K 14/7051; C07K 14/5434; C07K 14/5443; C07K 14/7155; C07K 16/2803

(57) ABSTRACT

The present disclosure is related to compositions and methods for the regulated and controlled expression of proteins.

### CROSS REFERENCE TO RELATED APPLICATIONS

[0001] This application claims priority to the U.S. Provisional Patent Application No. 62/749,763 filed on Oct. 24, 2018, entitled ER TUNABLE PROTEIN REGULATION, and the U.S. Provisional Patent Application No. 62/860,368 filed on Jun. 12, 2019, entitled ER TUNABLE PROTEIN REGULATION, the contents of each of which are herein incorporated by reference in their entirety.

### REFERENCE TO THE SEQUENCE LISTING

[0002] The present application is being filed along with a Sequence Listing in electronic format. The Sequence Listing is provided as a file entitled 2095_1006PCT2_SL_ST25.txt created on Oct. 23, 2019, which is 1,185,388 bytes in size. The information in the electronic format of the sequence listing is incorporated herein by reference in its entirety.

### FIELD

[0003] The present disclosure relates to regulatable tunable biocircuit systems for the development of controlled and/or regulated therapeutic systems. In particular, the present disclosure provides destabilizing domains derived from human estrogen receptor (ER) which can tune protein stability of at least one payload, compositions and methods of use thereof. Regulatable biocircuits, effector modules and stimulus response elements containing destabilizing domains (DD) derived from human estrogen receptor protein (ER) are also disclosed.

### BACKGROUND

[0004] Safe and effective gene therapy requires tightly regulated expression of a therapeutic transgenic product (e.g., the protein product). Similarly, the analysis of gene function in development, cell differentiation and other physiological activities requires the controllable expression of a protein under investigation. However, current technologies do not allow titration of the timing or levels of target protein induction. Inadequate exogenous and/or endogenous gene control is a critical issue in numerous gene therapy settings. This lack of tunability also makes it difficult to safely express proteins with narrow or uncertain therapeutic windows or those requiring more titrated or transient expression.

[0005] However, when a specific small molecule ligand binds its intended DD as a ligand binding partner, the instability is reversed, and protein function is restored. Such a system is herein referred to as a biocircuit, with the canonical DD-containing biocircuit described above being the prototypical model biocircuit

[0006] It is believed that improvements of biocircuits, including those containing DDs can form the basis of a new class of cell and gene therapies that employ tunable and temporal control of gene expression and function. Such novel moieties are described by the present inventors as stimulus response elements (SREs) which act in the context of an effector module to complete a biocircuit arising from a stimulus and ultimately producing a signal or outcome. When properly formatted with a polypeptide payload, and when activated by a particular stimulus, e.g., a small molecule, biocircuit systems can be used to regulate transgene and/or protein levels either up or down by perpetuating a stabilizing signal or destabilizing signal. This approach has many advantages over existing methods of regulating protein function and/or expression, which are currently focused on top level transcriptional regulation via inducible promoters.

[0007] The present disclosure provides novel protein domains, in particular destabilizing domains (DDs) derived from human estrogen receptor (ER) that display small molecule dependent stability, and the biocircuit systems and effector modules comprising such DDs. Methods for tuning transgene functions using the same are also provided.

### SUMMARY

[0008] The present disclosure provides novel protein domains displaying small molecule dependent stability. Such protein domains are called destabilizing domains (DDs). In the absence of its binding ligand, the DD is destabilizing and causes degradation of a payload fused to the DD (e.g., a protein of interest (POI), while in the presence of its binding ligand, the fused DD and payload can be stabilized, and its stability is dose dependent. These systems are further taught in co-owned U.S. Provisional Patent Application No. 62/320,864 filed Apr. 11, 2016, 62/466,596 filed Mar. 3, 2017 and the International Publication WO2017/180587 (the contents of each of which are herein incorporated by reference in their entirety).

[0009] In some embodiments, the present disclosure describes biocircuit systems. Such systems may include at least one effector module. The effector module may include (a) a stimulus response element (SRE) and (b) at least one payload. The payload may include a protein of interest which is attached, appended or associated with the SRE. In one aspect, the SRE includes a destabilizing domain (DD). The DD may include in whole or in part, the human estrogen receptor (ER, having the amino acid sequence of:

SEQ ID NO. 1)
[sequence omitted].

[0010] In one embodiment, the DD includes a ligand binding domain of ER (SEQ ID NO. 1). The ligand, binding domain may include amino acids 305 to 509 of ER (SEQ ID NO. 2). In some aspects, the DD may include least one mutation, occurring at position 413 (N413) or at position 502 (Q502), relative to SEQ ID NO. 1. In one embodiment, the mutation may be at position 413 (N413) relative to SEQ ID NO. 1. The mutation at N413 may be N413D, N413T, N413H, N413A, N413Q, N413V, N413C, N413K, N413M, N413R, N413S, N413W, N413I, N413E, N413L, N413P, N413F, N413Y, and N413G. In another aspect, the mutation may be at position 502 (Q502) relative to SEQ ID NO. 1. The mutation at Q502 may be Q502H, Q502D, Q502E, Q502V, Q502A, Q502T, Q502N, Q502K, Q5025, Q502L, Q502Y, Q502W, Q502F, Q502I, Q502G, Q502P, Q502M, and Q502C. In one aspect, at least one mutation may be N413D. In one aspect at least one mutation may be N413T. In one aspect, at least one mutation may be Q502H. In one aspect, the DD includes at least two mutations such as, but not limited to N413T and Q502H or N413D and Q502H.

[0011] The DD may further comprise one or more mutations independently selected from L384M, M421G, G521R or Y537S.

[0012] In some embodiments, the DD may be selected from but not limited to ER (aa 305-549 of WT, L384M, N413D, M421G, G521R, Y537S) (SEQ ID NO. 19), ER (aa 305-549 of WT, L384M, N413F, M421G, G521R, Y537S) (SEQ ID NO. 27), ER (aa 305-549 of WT, L384M, N413L, M421G, G521R, Y537S) (SEQ ID NO. 29), ER (aa 305-549 of WT, L384M, N413Y, M421G, G521R, Y537S) (SEQ ID NO. 31), ER (aa 305-549 of WT, L384M, N413H, M421G, G521R, Y537S) (SEQ ID NO. 33), ER (aa 305-549 of WT, L384M, N413Q, M421G, G521R, Y537S) (SEQ ID NO. 35), ER (aa 305-549 of WT, L384M, N413I, M421G, G521R, Y537S) (SEQ ID NO. 37), ER (aa 305-549 of WT, L384M, N413M, M421G, G521R, Y537S) (SEQ ID NO. 39), ER (aa 305-549 of WT, L384M, N413K, M421G, G521R, Y537S) (SEQ ID NO. 41), ER (aa 305-549 of WT, L384M, N413V, M421G, G521R, Y537S) (SEQ ID NO. 43), ER (aa 305-549 of WT, L384M, N413S, M421G, G521R, Y537S) (SEQ ID NO. 45), ER (aa 305-549 of WT, L384M, N413C, M421G, G521R, Y537S) (SEQ ID NO. 47), ER (aa 305-549 of WT, L384M, N413W, M421G, G521R, Y537S) (SEQ ID NO. 49), ER (aa 305-549 of WT, L384M, N413P, M421G, G521R, Y537S) (SEQ ID NO. 51), ER (aa 305-549 of WT, L384M, N413R, M421G, G521R, Y537S) (SEQ ID NO. 53), ER (aa 305-549 of WT, L384M, N413T, M421G, G521R, Y537S) (SEQ ID NO. 55), ER (aa 305-549 of WT, L384M, N413A, M421G, G521R, Y537S) (SEQ ID NO. 57), ER (aa 305-549 of WT, L384M, N413E, M421G, G521R, Y537S) (SEQ ID NO. 59), ER (aa 305-549 of WT, L384M, N413G, M421G, G521R, Y537S) (SEQ ID NO. 61), ER (aa 305-549 of WT, L384M, M421G, Q502F, G521R, Y537S) (SEQ ID NO. 63), ER (aa 305-549 of WT, L384M, M421G, Q502L, G521R, Y537S) (SEQ ID NO. 65), ER (aa 305-549 of WT, L384M, M421G, Q502Y, G521R, Y537S) (SEQ ID NO. 67), ER (aa 305-549 of WT, L384M, M421G, Q502H, G521R, Y537S) (SEQ ID NO. 69), ER (aa 305-549 of WT, L384M, M421G, Q502I, G521R, Y537S) (SEQ ID NO. 71), ER (aa 305-549 of WT, L384M, M421G, Q502M, G521R, Y537S) (SEQ ID NO. 73), ER (aa 305-549 of WT, L384M, M421G, Q502N, G521R, Y537S) (SEQ ID NO. 75), ER (aa 305-549 of WT, L384M, M421G, Q502K, G521R, Y537S) (SEQ ID NO. 77), ER (aa 305-549 of WT, L384M, M421G, Q502V, G521R, Y537S) (SEQ ID NO. 79), ER (aa 305-549 of WT, L384M, M421G, Q5025, G521R, Y537S) (SEQ ID NO. 81), ER (aa 305-549 of WT, L384M, M421G, Q502C, G521R, Y537S) (SEQ ID NO. 83), ER (aa 305-549 of WT, L384M, M421G, Q502W, G521R, Y537S) (SEQ ID NO. 85), ER (aa 305-549 of WT, L384M, M421G, Q502P, G521R, Y537S) (SEQ ID NO. 87), ER (aa 305-549 of WT, L384M, M421G, Q502T, G521R, Y537S) (SEQ ID NO. 89), ER (aa 305-549 of WT, L384M, M421G, Q502A, G521R, Y537S) (SEQ ID NO. 91), ER (aa 305-549 of WT, L384M, M421G, Q502D, G521R, Y537S) (SEQ ID NO. 93), ER (aa 305-549 of WT, L384M, M421G, Q502E, G521R, Y537S) (SEQ ID NO. 95), and ER (aa 305-549 of WT, L384M, M421G, Q502G, G521R, Y537S) (SEQ ID NO. 97).

[0013] In one embodiment, the DD is ER (aa 305-549 of WT, L384M, M421G, Q502D, G521R, Y537S) (SEQ ID NO. 93).

[0014] In one embodiment, the DD is ER (aa 305-549 of WT, L384M, M421G, Q502H, G521R, Y537S) (SEQ ID NO. 69).

[0015] In one embodiment, the DD is ER (aa 305-549 of WT, L384M, N413T, M421G, G521R, Y537S) (SEQ ID NO. 55)

[0016] In one embodiment, the DD is ER (aa 305-549 of WT, L384M, N413H, M421G, G521R, Y537S) (SEQ ID NO. 33).

[0017] In one embodiment, the DD is ER (aa 305-549 of WT, L384M, N413D, M421G, G521R, Y537S) (SEQ ID NO. 19).

[0018] The DDs described herein may further include one or more mutations such as but not limited to K303R, N3045, 5305N, R335G, T371A, T431I, N5195, E523G, A546T, or G442V.

[0019] The SREs described herein may include one or more payloads. The payload may be a natural protein or a variant thereof or a fusion polypeptide, or an antibody or a fragment thereof or a therapeutic agent or a gene therapy.

[0020] In one embodiment, the payload may be a therapeutic agent. The therapeutic agent may be chimeric antigen receptor, a cytokine or a cytokine-cytokine receptor fusion protein. In some aspects, the payload may be a cytokine. In some embodiments, the cytokine may be IL12. The IL12 may include a p40 subunit (SEQ ID NO. 111) appended to a p35 subunit (SEQ ID NO. 113). The effector modules that include IL12 may have an amino acid sequence such as but not limited to SEQ ID NO. 232; 208; 158-217; 219-231; and/or SEQ ID NO. 233-242. In one embodiment, the effector module may include the amino acid sequence of SEQ ID NO. 232. In one embodiment, the effector module may include the amino acid sequence of SEQ ID NO. 208.

[0021] The SRE of the biocircuit system may be SRE is responsive to one or more stimuli. The stimulus may be a small molecule. The small molecule may include but is not limited to Bazedoxifene, raloxifene 4-hydroxytamoxifen (4-OHT), fulvestrant, oremifene, lasofoxifene, clomifene, femarelle and ormeloxifene. In one embodiment, the small molecule is Bazedoxifene.

[0022] In one embodiment, the small molecule is raloxifene.

[0023] Provided herein are compositions comprising an effector module that includes a stimulus response element as well as at least one payload such as but not limited to chimeric antigen receptor, a cytokine or a cytokine-cytokine receptor fusion protein. The SRE may be a destabilizing domain derived from a region of human estrogen receptor (SEQ ID NO. 1) which may include one or more mutations relative to SEQ ID NO.1 such as but not limited to T371A, N5195, K303R, N3045, 5305N, R335G, T431I, E523G, A546T, and G442V. The DD may further include one or mutations such as but not limited to L384M, M421G, G521R, and/or Y537S. Non-limiting examples of DDs may include ER (aa 305-549 of WT, T371A, L384M, M421G, N5195, G521R, Y537S) (SEQ ID NO. 8), ER (aa 303-549 of WT, K303R, N3045, T371A, L384M, M421G, N5195, G521R, Y537S) (SEQ ID NO. 12), ER (aa 305-549 of WT, R335G, L384M, M421G, N5195, G521R, Y537S) (SEQ ID NO. 13), ER (aa 305-549 of WT, R335G, L384M, M421G, G521R, E523G, Y537S, A546T) (SEQ ID NO. 15), ER (aa 305-549 of WT, L384M, M421G, T431I, G521R, Y537S) (SEQ ID NO. 17), ER (aa 305-549 of WT, L384M, N413D, M421G, G521R, Y537S) (SEQ ID NO. 19), ER (aa 305-549 of WT, L384M, M421G, N5195, G521R, Y537S) (SEQ ID NO. 21), ER (aa 305-549 of WT, L384M, M421G, Q502R, G521R, Y537S) (SEQ ID NO. 23), ER (aa 305-549 of WT, 5305N, L384M, M421G, G442V, G521R, Y537S) (SEQ ID NO. 25), and/or ER (aa 305-549 of WT, L384M, M421G, G521R, Y537S) (SEQ ID NO. 4).

[0024] In one embodiment, the composition may include a DD such as is ER (aa 305-549 of WT, T371A, L384M, M421G, N5195, G521R, Y537S) (SEQ ID NO. 8).

[0025] In some aspects, the payload may be a chimeric antigen receptor which may include (a) an extracellular target moiety; (b) a hinge and transmembrane domain; (c) an intracellular signaling domain; and (d) optionally, one or more co-stimulatory domains. The extracellular target moiety of the CAR may have an affinity or bind to a target molecule on the surface of a cancer cell. In some embodiments, the extracellular moiety of the CAR may be an scFv. In some aspects, the target molecule may be CD19. In some aspects, the extracellular target moiety of the CAR may be a CD19 scFv which may include SEQ ID NO. 103; or SEQ ID NO. 368.

[0026] The intracellular signaling domain of the CAR described herein may be the signaling domain derived from CD3zeta or a cell surface molecule, which may be derived from FcR gamma, FcR beta, CD3 gamma, CD3 delta, CD3 epsilon, CD5, CD22, CD79a, CD79b, and CD66d. In some aspects, the co-stimulatory domain of the CAR may be present and may be derived from 4-1BB (CD137) 2B4, HVEM, ICOS, LAG3, DAP10, DAP12, CD27, CD28, OX40 (CD134), CD30, CD40, ICOS (CD278), glucocorticoid-induced tumor necrosis factor receptor (GITR), lymphocyte function-associated antigen-1 (LFA-1), CD2, CD7, LIGHT, NKG2C, and/or B7-H3.

[0027] In one aspect, the intracellular signaling domain of the CAR may be derived from CD3 zeta, and such CD3 zeta domains may have the amino acid sequence of SEQ ID NO. 109. In some aspects, the co-stimulatory domain of the CAR may be present and be derived from 4-1BB. In one aspect, the costimulatory domain may include the amino acid sequence of SEQ ID NO. 107. In some aspects, the CAR may further include a signal sequence. The signal sequence may be derived from CD8a. In one embodiment, the signal sequence may include the amino acid sequence of SEQ ID NO. 99. Non-limiting examples of effector module that include CARs may be SEQ ID NO. 412, 410, 414, 416, 418, 420, 422, 394, 398, 388, 390, 392, 396, 400, 402, 404, and 406. In one embodiment, the effector module may be SEQ ID NO. 412. In one embodiment, the effector module may be SEQ ID NO. 410. In one embodiment, the effector module may be SEQ ID NO. 414. In one embodiment, the effector module may be SEQ ID NO. 418.

[0028] In some embodiments, the effector module may be a cytokine such as but not limited to IL12. Non-limiting examples of IL12 effector modules include SEQ ID NO. 240, 160, 242, 130, 133, 136, 139, 142, 145, 148, 151, 154, and 382. In one embodiment, the effector module may be SEQ ID NO. 240. In one embodiment, the effector module may be SEQ ID NO. 160. In one embodiment, the effector module may be SEQ ID NO. 242. In some aspects, the compositions that include IL12 effector modules may further include a chimeric antigen receptor such as but not limited to CD19 CAR. The CAR in some aspects may be SEQ ID NO. 128, SEQ ID NO. 380, and/or SEQ ID NO. 386. In some aspects, compositions that include IL12 effector modules and a CAR may have an amino acid sequence of SEQ ID NO. 156, 373, 375, 377, 384, and 426. In one embodiment, the composition may be SEQ ID NO. 156. In one embodiment, the composition may be SEQ ID NO. 373. In one embodiment, the composition may be SEQ ID NO. 426.

[0029] In some embodiments, the payload may be a cytokine-cytokine receptor fusion protein such as but not limited to the whole or a portion of IL15, fused to the whole or a portion of IL15Ra to produce an IL15-IL15Ra fusion protein. In one aspect, the cytokine-cytokine receptor fusion protein may be SEQ ID NO. 246 fused to SEQ ID NO. 248 to produce a fusion polypeptide. Non limiting examples of IL15-IL15Ra fusion protein may be SEQ ID NO. 252, 254, 256, 258, 260, 262, 264, 266, and 268. In one embodiment, the IL15-IL15Ra fusion protein may be SEQ ID NO. 252. In one embodiment, the IL15-IL15Ra fusion protein may be SEQ ID NO. 256. In one embodiment, the IL15-IL15Ra fusion protein may be SEQ ID NO. 268.

[0030] Also provided herein are polynucleotides encoding the compositions described herein, a vector that includes the polynucleotides, a pharmaceutical composition that includes the compositions described herein and a pharmaceutically acceptable excipient, as well as immune cells for adoptive cell transfer (ACT) which may express the compositions, the pharmaceutical composition, the polynucleotide or vectors described herein.

[0031] Also provided herein are polynucleotides and vectors encoding the biocircuit systems as well as pharmaceutical compositions which include the biocircuit systems described herein and a pharmaceutically acceptable excipient.

[0032] In some embodiments, the present disclosure describes methods of reducing tumor burden in a subject. Such methods may include contacting an immune cell with a composition, which may include an effector module. In some aspects, the effector module may further include a stimulus response element (SRE) operably linked to an immunotherapeutic agent. In some aspects, the immunotherapeutic agent may be a chimeric antigen receptor. The SRE described herein may be a DD which may be derived from human estrogen receptor (ER; SEQ ID NO.1). The SRE may be responsive to or interact with a stimulus. The methods of reducing tumor burden may further include administering a therapeutically effective amount of the immune cell to the subject; and administering to the subject, a therapeutically effective amount of the stimulus. In some aspects, the stimulus may be able to modulate the expression of the immunotherapeutic agent. In one embodiment, the immunotherapeutic agent may be able to reduce the tumor burden by inducing an immune response. In some aspects, the stimulus may be a ligand. Non-limiting examples of ligands include bazedoxifene, raloxifene 4-hydroxytamoxifen (4-OHT), fulvestrant, oremifene, lasofoxifene, clomifene, femarelle and ormeloxifene. In some aspects, the ligand may be Bazedoxifene. In some embodiments, the method of reducing tumor burden may involve administering Bazedoxifene at a dose ranging from about 10 mg/kg to about 1000 mg/kg body weight of the subject. In one embodiment, the Bazedoxifene may be administered to the subject at a dose of 200 mg/kg body weight of the subject. In one aspect, the Bazedoxifene may be administered to the subject at a dose of 100 mg/kg body weight of the subject. In one embodiment, the Bazedoxifene may be administered to the subject at a dose of 50 mg/kg body weight of the subject. In some aspects, the Bazedoxifene may be administered to the subject once a day.

[0033] Also provided herein are methods of inducing an immune response in a subject. Such methods may involve contacting an immune cell with the compositions described herein. In some embodiments, the compositions described herein may include an immunotherapeutic agent, which may be able to induce an immune response. In some aspects, the immune cell may be treated with the stimulus prior to being administered to the subject. In one embodiment, the immune response in the subject may be measured by an induction of at least one cell marker, such as but not limited to cell markers such as interferon gamma or granzyme B.

[0034] In one embodiment, the immunotherapeutic agent may be a CAR such as a CD19 CAR. In some embodiments, the effector modules useful in the present disclosure may be SEQ ID NO. 412, 410, 414, 416, 418, 420, 422, 394, 398, 388, 390, 392, 396, 400, 402, 404, and 406. In one aspect, the effector module may be SEQ ID NO. 412. In one aspect, the effector module may be SEQ ID NO. 410. In one aspect, the effector module may be SEQ ID NO. 418.

### DETAILED DESCRIPTION

[0035] The details of one or more embodiments of the disclosure are set forth in the accompanying description below. Although any materials and methods similar or equivalent to those described herein can be used in the practice or testing of the present disclosure, the preferred materials and methods are now described. Other features, objects and advantages of the disclosure will be apparent from the description. In the description, the singular forms also include the plural unless the context clearly dictates otherwise. Unless defined otherwise, all technical and scientific terms used herein have the same meaning as commonly understood by one of ordinary skill in the art to which this disclosure belongs. In the case of conflict, the present description will control.

### I. Introduction

### Protein Regulation

[0036] The ability to conditionally control protein levels is a powerful tool in gene and cell therapy. Techniques to control protein expression on a genetic level have been widely studied. The Cre-Lox technology provides a useful approach to activate or inactivate genes. Tissue or cell specific promoters can be used to control spatial and temporal expression of genes of interest. However, this system is limited in application due to the irreversible nature of the perturbation. The transcription of the gene of interest can be conditionally regulated using tools such as Doxycycline (Dox)-inducible system. Alternatively, the stability of mRNA can be regulated using RNA interference techniques. However, methods targeting DNA or RNA are slow acting, irreversible and have low efficiency.

[0037] One approach to regulated protein expression or function is the use of Destabilizing Domains (DDs). Destabilizing domains are small protein domains that can be appended to a target protein of interest. DDs render the attached protein of interest unstable in the absence of a DD-binding ligand such that the protein is rapidly degraded by the ubiquitin-proteasome system of the cell

[0038] Direct manipulation of activities at the protein level provides significant advantages in flexibility, reversibility and speed. Strategies which directly trigger a cell's natural degradation system have been developed. Szostak and colleagues showed that a small peptide sequence could be fused to the N-terminus of a protein of interest to modulate protein stability. Varshaysky and coworkers isolated a temperature-sensitive peptide sequence that greatly reduced the half-life of dihydrofolate reductase (DHFR) at the non-permissive temperatures. These mutants have been widely used to study protein functions in yeast.

[0039] Subsequently, reversible systems employing a rapamycin derivative for the regulation of GSK-3β kinase fused to an unstable triple-mutant of the FRB domain (FRB*) were developed. The rapamycin derivative induces dimerization of the FRB*-GSK-3β and endogenous FKBP12 and stabilizes the FRB* fusion thus restoring the function of the fused kinase.

[0040] Building on the FRB* domain system, Banaszynski, et al., developed a cell-permeable ligand system using mutants of FKBP12 protein which were engineered to be unstable in the absence of a high-affinity ligand, Shield-1. (Banaszynski et al., Cell. 2006; 126:995-1004). They termed these unstable domains, destabilizing domains (DDs).

[0041] The FKBP/shield-1 tuning system has been successfully used in several studies to control target proteins. For example, Dettwier et al., fused FKBP to tune the express of NADPH P450 oxidoreductase (POR) (Dettwier et al., PLoS One, 2014, 9(11): e113540).

[0042] The FKBP DD-shield system has been used in cell lines, transgenic mice, protozoan Entamoeba histolytica, the flatworm Caenorhabditis elegans, the medaka, and transgenic xenografts to investigate the activity of a protein of interest and for iPSC reprogramming.

[0043] In addition, the destabilizing domain has been used for the conditional knock down/knock out of the target gene fused with the destabilizing domain. Park et al achieved this genomic engineering by CRISPR/Cas9-mediated homologous recombination and a donor template coding for a resistance cassette and the DD-tagged TCOF1 sequence.

[0044] More recently protein switches useful as biosensors as well as new chimeric antigen receptors and other small molecule stabilization frameworks have been disclosed.

[0045] One drawback of the FKBP/Shield-1 is that Shield-1 is a novel drug whose biodistribution is not fully characterized and it is not known to what extent Shield-1 crosses the blood-brain barrier.

[0046] Other DD ligand pairs include estrogen receptor domains which can be regulated by several estrogen receptor antagonists (Miyazaki et al., J Am Chem. Soc., 2012, 134(9): 3942-3945), and fluorescent destabilizing domain (FDD) derived from bilirubin-inducible fluorescent protein, UnaG. A FDD and its cognate ligand bilirubin (BR) can induce degradation of a protein fused to the FDD (Navarro et al., ACS Chem Biol., 2016, June 6, Epub). Other known DDs and their applications in protein stability include those described in U.S. Pat. Nos. 8,173,792 and 8,530,636, the contents of which are each incorporated herein by reference in their entirety.

[0047] In an orthogonal approach, the destabilizing domains of the bacterial dihydrofolate reductase (ecDHFR) were explored. Numerous inhibitors of DHFR have been developed as drugs and one such inhibitor Trimethoprim (TMP), inhibits ecDHFR much more potently than mammalian DHFR providing specificity to the interaction. Additionally, TMP is commercially available and has desirable pharmacological properties making this protein-ligand pair ideal for development for use as a biocircuit (Iwamoto, et al., Chem Biol. (2010) September 24; 17(9): 981-988).

[0048] The present disclosure expands upon the technology of tuning protein stability using novel destabilizing domains derived from estrogen receptor (ER). The destabilization and stabilization of a protein of interest, e.g., a transgene for gene therapy, can be controlled by ER mutant DDs having destabilizing or stabilizing properties and their ligands, e.g. Trimethoprim and Methotrexate specifically binding to such protein domains. The presence and/or absence of a small molecule ligand can tune the activity of a protein of interest that is genetically fused to the destabilizing domain.

### II. Compositions of the Disclosure

[0049] A variety of strategies that can directly control protein, e.g., a transgene, expression and function are available. The present disclosure provides novel protein domains displaying small molecule dependent stability. Such protein domains are called destabilizing domains (DDs). In the absence of its binding ligand, the DD causes degradation of a payload such as a protein of interest (POI) that is operably linked to the DD, while in the presence of its binding ligand, the fused DD and payload can be stabilized, and its stability is dose dependent.

[0050] According to the present disclosure, biocircuit systems are provided which comprise, at their core, at least one effector module system. Such effector module systems comprise at least one effector module having associated, or integral therewith, one or more stimulus response elements (SREs). The overall architecture of a biocircuit system of the disclosure is illustrated in FIG. 1 of International Publication No. WO2017180587 (the contents of which are herein incorporated by reference in their entirety), which shows an overview diagram of a biocircuit system of the disclosure. The biocircuit comprises a stimulus and at least one effector module responsive to a stimulus, where the response to the stimulus produces a signal or outcome. The effector module comprises at least one stimulus response element (SRE) and one payload. In particular, biocircuit systems and effector modules comprising the novel destabilizing domains discussed herein are provided. In some embodiments, the SRE is ER-derived SRE. In some embodiments, the effector module described herein may be a ER-derived SRE operably linked to a payload. FIG. 2 of International Publication No. WO2017180587 (the contents of which are herein incorporated by reference in their entirety) shows representative effector modules carrying one payload. The signal sequence (SS), SRE and payload may be located or positioned in various arrangements without (A to F) or with (G to Z, and AA to DD) a cleavage site. An optional linker may be inserted between each component of the effector module. FIG. 3 of International Publication No. WO2017180587 (the contents of which are herein incorporated by reference in their entirety) shows representative effector modules carrying two payloads without a cleavage site. The two payloads may be either directly linked to each other or separated.

[0051] As used herein, a “biocircuit” or “biocircuit system” is defined as a circuit within or useful in biologic systems comprising a stimulus and at least one effector module responsive to a stimulus, where the response to the stimulus produces at least one signal or outcome within, between, as an indicator of, or on a biologic system. Biologic systems are generally understood to be any cell, tissue, organ, organ system or organism, whether animal, plant, fungi, bacterial, or viral. It is also understood that biocircuits may be artificial circuits which employ the stimuli or effector modules taught by the present disclosure and effect signals or outcomes in acellular environments such as with diagnostic, reporter systems, devices, assays or kits. The artificial circuits may be associated with one or more electronic, magnetic, or radioactive components or parts. A much-detailed description of a biocircuit system can be found in International Publication No. WO2017180587 (the contents of which are herein incorporated by reference in their entirety).

[0052] In one aspect of the present disclosure, the biocircuit system is a DD biocircuit system.

[0053] As used herein, an “effector module” is a single or multi-component construct or complex comprising at least (a) one or more stimulus response elements (SREs) and (b) one or more payloads (i.e. proteins of interest (POIs). In the context of the present disclosure, the SRE is a DD.

[0054] As used herein a “payload” or “target payload” is defined as any protein or nucleic acid whose function is to be altered. Payloads may include any coding or non-coding gene or any protein or fragment thereof, or fusion constructs, or antibodies.

[0055] In some embodiments, the present disclosure provides biocircuit systems, effector modules and compositions comprising the DDs of the present disclosure. In one aspect, the biocircuit system is a DD biocircuit system.

[0056] Payloads are often associated with one or more SREs (e.g., DDs) and may be encoded alone or in combination with one or more DD in a polynucleotide of the disclosure. Payloads themselves may be altered (at the protein or nucleic acid level) thereby providing for an added layer of tenability of the effector module. For example, payloads may be engineered or designed to contain mutations, single or multiple, which affect the stability of the payload or its susceptibility to degradation, cleavage or trafficking. The combination of a DD which can have a spectrum of responses to a stimulus with a payload which is altered to exhibit a variety of responses or gradations of output signals, e.g., expression levels, produce biocircuits which are superior to those in the art. For example, mutations or substitutional designs such as those created for IL12 in WO2016048903 (specifically in Example 1 therein), the contents of which are incorporated herein by reference in their entirety, may be used in any protein payload in conjunction with a DD of the present disclosure to create dual tunable biocircuits. The ability to independently tune both the DD and the payload greatly increases the scope of uses of the effector modules of the present disclosure.

[0057] Effector modules may be designed to include one or more payloads, one or more DDs, one or more cleavage sites, one or more signal sequences, one or more tags, one or more targeting peptides, and one or more additional features including the presence or absence of one or more linkers. Representative effector module embodiments of the disclosure are illustrated in FIGS. 2-3 of International Publication No. WO2017180587 (the contents of which are herein incorporated by reference in their entirety). In some aspects, the DD can be positioned at the N-terminal end, or the C-terminal end, or internal of the effector module construct. Different components of an effector module such as DDs, payloads and additional features are organized linearly in one construct or are separately constructed in separate constructs.

[0058] Additionally, effector modules of the present disclosure may further comprise other regulatory moieties such as inducible promoters, enhancer sequences, microRNA sites, and/or microRNA targeting sites that provide flexibility on controlling the activity of the payload. The payloads of the present disclosure may be any natural proteins and their variants, or fusion polypeptides, antibodies and variants thereof, transgenes and therapeutic agents.

[0059] The stimulus of the biocircuit system may be, but is not limited to, a ligand, a small molecule, an environmental signal (e.g., pH, temperature, light and subcellular location), a peptide or a metabolite. In one aspect of the present disclosure, the stimulus is a ER DD binding ligand including methotrexate (MTX) and trimethoprim (TMP).

[0060] Polypeptides of DDs, biocircuit systems and effector modules comprising such DDs and payload constructs, other components, polynucleotides encoding these polypeptides and variants thereof, vectors comprising these polynucleotides, are provided in the present disclosure. The vector may be a plasmid or a viral vector including but not limited to a lentiviral vector, a retroviral vector, a recombinant AAV vector and oncolytic viral vector.

[0061] According to the present disclosure, biocircuit systems and effector modules of the disclosure can be used to regulate the expression and activity of a payload in response to the presence or absence of a ligand that specifically binds to the DD integrated within the biocircuit system and effector module.

[0062] In some aspects, DDs, effector modules and biocircuit systems of the disclosure may be used to regulate the expression, function and activity of a payload in a cell or a subject. The regulation refers to a lever of change of its expression, function and activity, by at least about 10%, or at least about 20%, or at least about 30%, or at least about 40%, or at least about 50%, or at least about 60%, or at least about 70%, or at least about 80%, or at least about 85%, or at least about 90%, or at least about 95%, or at least about 100%, or at least 20-30%, 20-40%, 20-50%, 20-60%, 20-70%, 20-80%, 20-90%, 20-95%, 20-100%, 30-40%, 30-50%, 30-60%, 30-70%, 30-80%, 30-90%, 30-95%, 30-100%, 40-50%, 40-60%, 40-70%, 40-80%, 40-90%, 40-95%, 40-100%, 50-60%, 50-70%, 50-80%, 50-90%, 50-95%, 50-100%, 60-70%, 60-80%, 60-90%, 60-95%, 60-100%, 70-80%, 70-90%, 70-95%, 70-100%, 80-90%, 80-95%, 80-100%, 90-95%, 90-100% or 95-100%.

[0063] In some embodiments, the present disclosure provides methods for modulating protein, expression, function or level by measuring the stabilization ratio, destabilization ratio, and destabilizing mutation co-efficient. As used herein, the stabilization ratio may be defined as the ratio of expression, function or level of a protein of interest in response to the stimulus to the expression, function or level of the protein of interest in the absence of the stimulus specific to the SRE. In some aspects, the stabilization ratio is at least 1, such as by at least 1-10, 1-20, 1-30, 1-40, 1-50, 1-60, 1-70, 1-80, 1-90, 1-100, 20-30, 20-40, 20-50, 20-60, 20-70, 20-80, 20-90, 20-95, 20-100, 30-40, 30-50, 30-60, 30-70, 30-80, 30-90, 30-95, 30-100, 40-50, 40-60, 40-70, 40-80, 40-90, 40-95, 40-100, 50-60, 50-70, 50-80, 50-90, 50-95, 50-100, 60-70, 60-80, 60-90, 60-95, 60-100, 70-80, 70-90, 70-95, 70-100, 80-90, 80-95, 80-100, 90-95, 90-100 or 95-100. As used herein, the destabilization ratio may be defined as the ratio of expression, function or level of a protein of interest in the absence of the stimulus specific to the effector module to the expression, function or level of the protein of interest, that is expressed constitutively and in the absence of the stimulus specific to the SRE. As used herein “constitutively” refers to the expression, function or level a protein of interest that is not linked to an SRE or is linked to the wildtype protein from which the SRE is derived and is therefore expressed both in the presence and absence of the stimulus. As used herein, the destabilizing mutation co-efficient may be defined as the ratio of expression or level of a protein of interest that is appended to a DD, in the absence of the stimulus specific to the effector module to the expression, function or level of the protein that is appended to the wild type protein from which the DD is derived. In some aspects, the destabilization ratio and the destabilizing mutation co-efficient is at least 0, such as by at least 0.1, 0.2, 0.3, 0.4, 0.5, 0.6, 0.7, 0.8, 0.9, or at least, 0-0.1, 0-0.2, 0-0.3, 0-0.4, 0-0.5, 0-0.6, 0-0.7, 0-0.8, 0-0.9, 0.1-0.2, 0.1-0.3, 0.1-0.4, 0.1-0.5, 0.1-0.6, 0.1-0.7, 0.1-0.8, 0.1-0.9, 0.2-0.3, 0.2-0.4, 0.2-0.5, 0.2-0.6, 0.2-0.7, 0.2-0.8, 0.2-0.9, 0.3-0.4, 0.3-0.5, 0.3-0.6, 0.3-0.7, 0.3-0.8, 0.3-0.9, 0.4-0.5, 0.4-0.6, 0.4-0.7, 0.4-0.8, 0.4-0.9, 0.5-0.6, 0.5-0.7, 0.5-0.8, 0.5-0.9, 0.6-0.7, 0.6-0.8, 0.6-0.9, 0.7-0.8, 0.7-0.9 or 0.8-0.9.

[0064] The position of the payload with respect to the DD, within the SRE may be varied to achieve optimal DD regulation. In some embodiments, the payload may be fused to the N terminus of the DD. In another embodiment, the payload may be fused to the C terminus of the DDs. An optional start codon nucleotide sequence encoding for methionine may be added to the DD and/or payload. In some embodiments, effector modules of the present disclosure may include one or more degrons to tune expression. As used herein, a “degron” refers to a minimal sequence within a protein that is sufficient for the recognition and the degradation by the proteolytic system. An important property of degrons is that they are transferrable, that is, appending a degron to a sequence confers degradation upon the sequence. In some embodiments, the degron may be appended to the destabilizing domains, the payload or both. Incorporation of the degron within the effector module of the disclosure, confers additional protein instability to the effector module and may be used to minimize basal expression. In some embodiments, the degron may be an N-degron, a phospho degron, a heat inducible degron, a photosensitive degron, an oxygen dependent degron. As a non-limiting example, the degron may be an Ornithine decarboxylase degron as described by Takeuchi et al. (Takeuchi J et al. (2008). Biochem J. 2008 Mar. 1; 410(2):401-7; the contents of which are incorporated by reference in their entirety). Other examples of degrons useful in the present disclosure include degrons described in International patent publication Nos. WO2017004022, WO2016210343, and WO2011062962; the contents of each of which are incorporated by reference in their entirety.

[0065] In some embodiments, more than one biocircuit system may be used in combination to control various protein functions in the same cell or organism, each of which uses different DD and ligand pair and can be regulated separately.

[0066] In some embodiments, biocircuits of the disclosure may be modified to reduce their immunogenicity. Immunogenicity is the result of a complex series of responses to a substance that is perceived as foreign and may include the production of neutralizing and non-neutralizing antibodies, formation of immune complexes, complement activation, mast cell activation, inflammation, hypersensitivity responses, and anaphylaxis. Several factors can contribute to protein immunogenicity, including, but not limited to protein sequence, route and frequency of administration and patient population. In a preferred embodiment, protein engineering may be used to reduce the immunogenicity of the compositions of the disclosure. In some embodiments, modifications to reduce immunogenicity may include modifications that reduce binding of the processed peptides derived from the parent sequence to MHC proteins. For example, amino acid modifications may be engineered such that there are no or a minimal of number of immune epitopes that are predicted to bind with high affinity, to any prevalent MHC alleles. Several methods of identifying MHC binding epitopes of known protein sequences are known in the art and may be used to score epitopes in the compositions of the present disclosure. Such methods are disclosed in US Patent Publication No. US 20020119492, US20040230380, and US 20060148009; the contents of each of which are incorporated by reference in their entirety.

[0067] Epitope identification and subsequent sequence modification may be applied to reduce immunogenicity. The identification of immunogenic epitopes may be achieved either physically or computationally. Physical methods of epitope identification may include, for example, mass spectrometry and tissue culture/cellular techniques. Computational approaches that utilize information obtained on antigen processing, loading and display, structural and/or proteomic data toward identifying non-self-peptides that may result from antigen processing, and that are likely to have good binding characteristics in the groove of the MHC may also be utilized. One or more mutations may be introduced into the biocircuits of the disclosure directing the expression of the protein, to maintain its functionality while simultaneously rendering the identified epitope less or non-immunogenic.

[0068] In some embodiments, the endoplasmic reticulum associated degradation (ERAD) pathway may be used to optimize degradation of the payloads described herein e.g. secreted and membrane cargos. In one embodiment, the effector modules of the disclosure may have directed to the E3 ligases by using adaptor proteins or protein domains. The endoplasmic reticulum is endowed with a specialized machinery to ensure proteins deployed to the distal secretory pathway are correctly folded and assembled into native oligomeric complexes. Proteins failing to meet this conformational standard are degraded by the ERAD pathway, a process through which folding defective proteins are selected and ultimately degraded by the ubiquitin proteasome system. ERAD proceeds through four main steps involving substrate selection, dislocation across the endoplasmic reticulum membrane, covalent conjugation with polyubiquitin, and proteasome degradation. Any of these steps may be modulated to optimize the degradation of the payloads and the effector modules described herein. Protein adaptors within the endoplasmic reticulum membrane, link substrate recognition to the ERAD machinery (herein referred to as the “dislocon”), which causes the dislocation of the proteins from the endoplasmic reticulum. Non-limiting examples of protein adaptors that may be used to optimize ERAD pathway degradation include but are not limited to SEL1L (an adaptor that links glycan recognition to the dislocon), Erlins (intermembrane substrate adaptors), Insigs (client specific adaptors), F-Box proteins (act as adaptors for dislocated glycoproteins in the cytoplasm) and viral-encoded adaptors.

[0069] In some embodiments, protein modifications engineered into the structure of the compositions of the disclosure to interfere with antigen processing and peptide loading such as glycosylation and PEGylation, may also be useful in the present disclosure. Compositions of the disclosure may also be engineered to include non-classical amino acid sidechains to design less immunogenic compositions. Any of the methods discussed in International Patent Publication No. WO2005051975 for reducing immunogenicity may be useful in the present disclosure (the contents of which are incorporated by reference in their entirety).

[0070] In one embodiment, patients may also be stratified according to the immunogenic peptides presented by their immune cells and may be utilized as a parameter to determine suitable patient cohorts that may therapeutically benefit for the compositions of the disclosure.

[0071] In some embodiments, reduced immunogenicity may be achieved by limiting immunoproteasome processing. The proteasome is an important cellular protease that is found in two forms: the constitutive proteasome, which is expressed in all cell types and which contains active e.g. catalytic subunits and the immunoproteasome that is expressed in cell of the hematopoietic lineage, and which contains different active subunits termed low molecular weight proteins (LMP) namely LMP-2, LMP-7 and LMP-10. Immunoproteasomes exhibit altered peptidase activities and cleavage site preferences that result in more efficient liberation of many MHC class I epitopes. A well described function of the immunoproteasome is to generate peptides with hydrophobic C terminus that can be processed to fit in the groove of MHC class I molecules. Deol P et al. have shown that immunoproteasomes may lead to a frequent cleavage of specific peptide bonds and thereby to a faster appearance of a certain peptide on the surface of the antigen presenting cells; and enhanced peptide quantities (Deol P et al. (2007) J Immunol 178 (12) 7557-7562; the contents of which are incorporated herein reference in its entirety). This study indicates that reduced immunoproteasome processing may be accompanied by reduced immunogenicity. In some embodiments, immunogenicity of the compositions of the disclosure may be reduced by modifying the sequence encoding the compositions of the disclosure to prevent immunoproteasome processing. Biocircuits of the present disclosure may also be combined with immunoproteasome-selective inhibitors to achieve the same effects. Examples of inhibitors useful in the present disclosure include UK-101 (B1i selective compound), IPSI-001, ONX 0914 (PR-957), and PR-924 (IPSI).

### Destabilizing Domains (DDs)

[0072] As used herein, the term “destabilizing domains (DDs)” refers to protein domains that are unstable and degraded in the absence of ligand, but whose stability is rescued by binding to a high affinity cell-permeable ligand. The term destabilizing domain (DD) is interchangeable with the term drug responsive domain (DRD). Destabilizing domains (DDs) can be appended to a target protein of interest (POI) and can convey its destabilizing property to the protein of interest, causing protein degradation. The presence, absence or an amount of a small molecule ligand that binds to or interacts with the DD, can, upon such binding or interaction modulate the stability of the payload(s) and consequently the function of the payload. A protein domain with destabilizing property (e.g. a DD) is used in conjunction with a cell-permeable ligand to regulate any protein of interest when it is fused with the destabilizing domain. DDs render the attached protein of interest unstable in the absence of a DD-binding ligand such that the protein is rapidly degraded by the ubiquitin-proteasome system of the cell. However, when a specific small molecule ligand binds its intended DD as a ligand binding partner, the instability is reversed, and protein function is restored. The conditional nature of DD stability allows a rapid and non-perturbing switch from stable protein to unstable substrate for degradation. Moreover, its dependency on the concentration of its ligand further provides tunable control of degradation rates. Depending on the degree of binding and/or interaction the altered function of the payload may vary, hence providing a “tuning” of the payload function.

[0073] Due to its reversibility, specificity and the fast and easy regulation on protein level, the post-transcriptional tuning system provides a useful system for gene regulation. Furthermore, the regulation may be dose-dependent, thereby altering the protein-turnover rate to transform a short-lived or no detectable protein into a protein that functions for a precisely controlled period of time (Iwamoto et al., Chem. Biol. 2010, 17: 981-988).

[0074] In some embodiments, the desired characteristics of the DDs may include, but are not limited to, low protein levels in the absence of a ligand of the DD (i.e. low basal stability), large dynamic range, robust and predictable dose-response behavior, and rapid kinetics of degradation. Candidate DDs that bind to a desired ligand, but not endogenous molecules may be preferred.

[0075] Candidate destabilizing domain sequence identified from protein domains of known wildtype proteins (as a template) may be mutated to generate libraries of mutants based on the template candidate domain sequence. Mutagenesis strategies used to generate DD libraries may include site-directed mutagenesis e.g. by using structure guided information, or random mutagenesis e.g. using error-prone PCR, or a combination of both. In some embodiments, destabilizing domains identified using random mutagenesis may be used to identify structural properties of the candidate DDs that may be required for destabilization, which may then be used to further generate libraries of mutations using site directed mutagenesis.

[0076] In some embodiments, novel DDs may be identified by mutating one or more amino acids in the candidate destabilizing domain to an amino acid that is vicinal to the mutation site. As used herein a vicinal amino acid refers to an amino acid that is located 1, 2, 3, 4, 5 or more amino acids upstream or downstream of the mutation site in the linear sequence and/or the crystal structure of the candidate destabilizing domain. In some embodiments, the vicinal amino acid may be a conserved amino acid (with similar physicochemical properties as the amino acid at the mutation site), a semi conserved amino acid (e.g. negatively to positively charge amino acid) or a non-conserved amino acid (with different physicochemical properties than the amino acid at the mutation site).

[0077] In some embodiments, DD mutant libraries may be screened for mutations with altered, preferably higher binding affinity to the ligand, as compared to the wild type protein. DD libraries may also be screened using two or more ligands and DD mutations that are stabilized by some ligands but not others may be preferentially selected. DD mutations that bind preferentially to the ligand compared to a naturally occurring protein may also be selected. Such methods may be used to optimize ligand selection and ligand binding affinity of the DD. Additionally, such approaches can be used to minimize deleterious effects caused by off-target ligand binding.

[0078] In some embodiments, suitable DDs may be identified by screening mutant libraries using barcodes. Such methods may be used to detect, identify and quantify individual mutant clones within the heterogeneous mutant library. Each DD mutant within the library may have distinct barcode sequences (with respect to each other). In other instances, the polynucleotides can also have different barcode sequences with respect to 2, 3, 4, 5, 6, 7, 8, 9, 10 or more nucleic acid bases. Each DD mutant within the library may also comprise a plurality of barcode sequences. When used in plurality barcodes may be used such that each barcode is unique to any other barcode. Alternatively, each barcode used may not be unique, but the combination of barcodes used may create a unique sequence that can be individually tracked. The barcode sequence may be placed upstream of the SRE, downstream of the SRE, or in some instances may be placed within the SRE. DD mutants may be identified by barcodes using sequencing approaches such as Sanger sequencing, and next generation sequencing, but also by polymerase chain reaction and quantitative polymerase chain reaction. In some embodiments, polymerase chain reaction primers that amplify a different size product for each barcode may be used to identify each barcode on an agarose gel. In other instances, each barcode may have a unique quantitative polymerase chain reaction probe sequence that enables targeted amplification of each barcode.

[0079] Inventors of the present disclosure investigated several human proteins and identified novel human DDs which can confer its instability features to the fused payload and facilitate the rapid degradation of the fusion polypeptide in the absence of its ligand but stabilize the fused payload in response to the binding to its ligand. Specifically, the new DDs are derived from human ER protein.

### Human ER Mutants

[0080] In some embodiments, DDs of the disclosure may be derived from human estrogen receptor. In some embodiments, the DDs may be derived from the human estrogen receptor alpha (herein referred to as ER or hER), which is encoded by the gene ESR1. In one embodiment, the DD may be derived from the Uniprot ID: P03372.2 (SEQ ID NO. 1). In some embodiments, the DD may be derived from a region or a portion of the estrogen receptor. In one embodiment, the DD may be derived from the ligand binding domain of the estrogen receptor comprising amino acids 305-549 of SEQ ID NO. 1 (SEQ ID NO. 2; encoded by SEQ ID NO. 3).

[0081] ER is a nuclear hormone receptor that is involved in the regulation of eukaryotic genes responsible for cellular proliferation and differentiation. When ER binds to its cognate ligand, estrogen results in nuclear transactivation by direct binding to a palindromic estrogen response element (ERE) sequence or association with other DNA-binding transcription factors.

[0082] In some embodiments, DDs described herein may include one or mutations. In some embodiments, the mutations may render the DDs incapable of binding to its cognate ligand estrogen, such that the DD does not interfere with endogenous estrogen signaling.

[0083] In some aspects, mutations may be engineered into the DD such that it can bind to ligands that are unable to bind to the Wildtype ER protein (SEQ ID NO. 1). In one embodiment, the ER DD may comprise L384M, M421G, G521R mutations that allow binding to synthetic ligands.

[0084] In some embodiments, the DDs may include a Y537S mutations, which may destabilize the ER protein.

[0085] In some embodiments, mutations may be engineered in the ER protein to improve ligand binding. The binding of the ER to CMP1 may be limited by the following residues in ER L391, F404, M421, 1424, and L428. One or more of these residues may be mutated to improve binding to ER. Non-limiting mutation examples include L384M, M421G, and M421.

[0086] In some embodiments, DDs of the present disclosure may be identified by utilizing a cocktail of ER binding ligands. In other instances, the suitable DDs may be identified by screening first with one ER binding ligand and subsequently screening with a second ER binding ligand.

[0087] In some embodiments, the destabilizing domains of the disclosure may include wildtype nucleotide sequences which may be utilized to reduce the basal expression of the compositions of the disclosure. In some embodiments, protein molecules described herein can bind to their cognate mRNA and effectively repressing its translation. Alternatively, the nucleic acid sequence of the codons may be selected to alter translation rates. In some embodiments, amino acids identified as critical regulators of ER translation repression may be mutated to enhance translation rates.

[0088] The ER DD amino acid sequences and nucleotide sequences are provided in Table 1. The position of a mutation described in Table 1 is with respect to the full length ER protein (SEQ ID NO. 1).

TABLE 1
ER DDs

| | | | AA | NA |
|---|---|---|---|---|
| | | | SEQ | SEQ |
| ERDD- | | | ID | ID |
| ID | Mutations | AA sequence | NO. | NO. |
| ERDD-2 | ER (aa 305-549 | SLALSLTADQMVSALLDAEPPILYSEYDPTRPF | 4 | 5-7 |
| | of WT, L384M, | SEASMMGLLTNLADRELVHMINWAKRVPGFV | | |
| | M421G, G521R, | DLTLHDQVHLLECAWMEILMIGLVWRSMEHP | | |
| | Y537S) | GKLLFAPNLLLDRNQGKCVEGGVEIFDMLLAT | | |
| | | SSRFRMIMNLQGEEFVCLKSIILLNSGVYTFLSS | | |
| | | TLKSLEEKDHIHRVLDKITDTLIHLMAKAGLTL | | |
| | | QQQHQRLAQLLLILSHIRHMSNKRMEHLYSM | | |
| | | KCKNVVPLSDLLLEMLDAHRL | | |
| ERDD-1 | ER (aa 305-549 | SLALSLTADQMVSALLDAEPPILYSEYDPTRPF | 8 | 9-11 |
| | of WT, T371A, | SEASMMGLLTNLADRELVHMINWAKRVPGFV | | |
| | L384M, M421G, | DLALHDQVHLLECAWMEILMIGLVWRSMEHP | | |
| | N519S, G521R, | GKLLFAPNLLLDRNQGKCVEGGVEIFDMLLAT | | |
| | Y537S) | SSRFRMIMNLQGEEFVCLKSIILLNSGVYTFLSS | | |
| | | TLKSLEEKDHIHRVLDKITDTLIHLMAKAGLTL | | |
| | | QQQHQRLAQLLLILSHIRHMSSKRMEHLYSMK | | |
| | | CKNVVPLSDLLLEMLDAHRL | | |
| ERDD-3 | ER (aa 303-549 | RSSLALSLTADQMVSALLDAEPPILYSEYDPTR | 12 | — |
| | of WT, K303R, | PFSEASMIVIGLLTNLADRELVHMINWAKRVPG | | |
| | N3045, T371A, | FVDLALHDQVHLLECAWMEILMIGLVWRSME | | |
| | L384M, M421G, | HPGKLLFAPNLLLDRNQGKCVEGGVEIFDMLL | | |
| | N519S, G521R, | ATSSRFRMMNLQGEEFVCLKSIILLNSGVYTFL | | |
| | Y537S) | SSTLKSLEEKDHIHRVLDKITDTLIHLMAKAGL | | |
| | | TLQQQHQRLAQLLLILSHIRHMSSKRMEHLYS | | |
| | | MKCKNVVPLSDLLLEMLDAHRL | | |
| ERDD-6 | ER (aa 305-549 | SLALSLTADQMVSALLDAEPPILYSEYDPTGPF | 13 | 14 |
| | of WT, R335G, | SEASMMGLLTNLADRELVHMINWAKRVPGFV | | |
| | L384M, M421G, | DLTLHDQVHLLECAWMEILMIGLVWRSMEHP | | |
| | N519S, G521R, | GKLLFAPNLLLDRNQGKCVEGGVEIFDMLLAT | | |
| | Y537S) | SSRFRMMNLQGEEFVCLKSIILLNSGVYTFLSS | | |
| | | TLKSLEEKDHIHRVLDKITDTLIHLMAKAGLTL | | |
| | | QQQHQRLAQLLLILSHIRHMSSKRMEHLYSMK | | |
| | | CKNVVPLSDLLLEMLDAHRL | | |
| ERDD-7 | ER (aa 305-549 | SLALSLTADQMVSALLDAEPPILYSEYDPTGPF | 15 | 16 |
| | of WT, R335G, | SEASMMGLLTNLADRELVHMINWAKRVPGFV | | |
| | L384M, M421G, | DLTLHDQVHLLECAWMEILMIGLVWRSMEHP | | |
| | G521R, E523G, | GKLLFAPNLLLDRNQGKCVEGGVEIFDMLLAT | | |
| | Y537S, A546T) | SSRFRMMNLQGEEFVCLKSIILLNSGVYTFLSS | | |
| | | TLKSLEEKDHIHRVLDKITDTLIHLMAKAGLTL | | |
| | | QQQHQRLAQLLLILSHIRHMSNKRMGHLYSM | | |
| | | KCKNVVPLSDLLLEMLDTHRL | | |
| ERDD-8 | ER (aa 305-549 | SLALSLTADQMVSALLDAEPPILYSEYDPTRPF | 17 | 18 |
| | of WT, L384M; | SEASMMGLLTNLADRELVHMINWAKRVPGFV | | |
| | M421G; T431I; | DLTLHDQVHLLECAWMEILMIGLVWRSMEHP | | |
| | G521R, Y537S) | GKLLFAPNLLLDRNQGKCVEGGVEIFDMLLAI | | |
| | | SSRFRMIMNLQGEEFVCLKSIILLNSGVYTFLSS | | |
| | | TLKSLEEKDHIHRVLDKITDTLIHLMAKAGLTL | | |
| | | QQQHQRLAQLLLILSHIRHMSNKRMEHLYSM | | |
| | | KCKNVVPLSDLLLEMLDAHRL | | |
| ERDD-9 | ER (aa 305-549 | SLALSLTADQMVSALLDAEPPILYSEYDPTRPF | 19 | 20 |
| | of WT, L384M, | SEASMMGLLTNLADRELVHMINWAKRVPGFV | | |
| | N413D, M421G, | DLTLHDQVHLLECAWMEILMIGLVWRSMEHP | | |
| | G521R, Y537S) | GKLLFAPNLLLDRDQGKCVEGGVEIFDMLLAT | | |
| | | SSRFRMIMNLQGEEFVCLKSIILLNSGVYTFLSS | | |
| | | TLKSLEEKDHIHRVLDKITDTLIHLMAKAGLTL | | |
| | | QQQHQRLAQLLLILSHIRHMSNKRMEHLYSM | | |
| | | KCKNVVPLSDLLLEMLDAHRL | | |
| ERDD- | ER (aa 305-549 | SLALSLTADQMVSALLDAEPPILYSEYDPTRPF | 21 | 22 |
| 10 | of WT, L384M, | SEASMMGLLTNLADRELVHMINWAKRVPGFV | | |
| | M421G, N519S, | DLTLHDQVHLLECAWMEILMIGLVWRSMEHP | | |
| | G521R, Y537S) | GKLLFAPNLLLDRNQGKCVEGGVEIFDMLLAT | | |
| | | SSRFRMIMNLQGEEFVCLKSIILLNSGVYTFLSS | | |
| | | TLKSLEEKDHIHRVLDKITDTLIHLMAKAGLTL | | |
| | | QQQHQRLAQLLLILSHIRHMSSKRMEHLYSMK | | |
| | | CKNVVPLSDLLLEMLDAHRL | | |
| ERDD- | ER (aa 305-549 | SLALSLTADQMVSALLDAEPPILYSEYDPTRPF | 23 | 24 |
| 11 | of WT, L384M, | SEASMMGLLTNLADRELVHMINWAKRVPGFV | | |
| | M421G, Q502R, | DLTLHDQVHLLECAWMEILMIGLVWRSMEHP | | |
| | G521R, Y537S) | GKLLFAPNLLLDRNQGKCVEGGVEIFDMLLAT | | |
| | | SSRFRMIMNLQGEEFVCLKSIILLNSGVYTFLSS | | |
| | | TLKSLEEKDHIHRVLDKITDTLIHLMAKAGLTL | | |
| | | QQQHRRLAQLLLILSHIRHMSNKRMEHLYSMK | | |
| | | CKNVVPLSDLLLEMLDAHRL | | |
| ERDD- | ER (aa 305-549 | NLALSLTADQMVSALLDAEPPILYSEYDPTRPF | 25 | 26 |
| 12 | of WT, S305N, | SEASMMGLLTNLADRELVHMINWAKRVPGFV | | |
| | L384M, M421G, | DLTLHDQVHLLECAWMEILMIGLVWRSMEHP | | |
| | G442V, G521R, | GKLLFAPNLLLDRNQGKCVEGGVEIFDMLLAT | | |
| | Y537S) | SSRFRMIMNLQVEEFVCLKSIILLNSGVYTFLSS | | |
| | | TLKSLEEKDHIHRVLDKITDTLIHLMAKAGLTL | | |
| | | QQQHQRLAQLLLILSHIRHMSNKRMEHLYSM | | |
| | | KCKNVVPLSDLLLEMLDAHRL | | |

[0089] In some embodiments, the ER derived destabilizing domains may be derived from variants, and or isoforms of ER.

[0090] In some embodiments, the first amino acid from the destabilizing domain may be removed or substituted when fused to the linker region or payload. As a non-limiting example, the first amino acid is methionine (M) and it is removed from the destabilizing domain.

[0091] The amino acid sequences of the destabilizing domains encompassed in the disclosure have at least about 40%, 50% or 60%, 70% identity, preferably at least about 75% or 80% identity, more preferably at least about 85%, 86%, 87%, 88%, 89% or 90% identity, and further preferably at least about 91%, 92%, 93%, 94%, 95%, 96%, 97%, 98%, or 99% identity to the amino acid sequences described therein. Percent identity may be determined, for example, by comparing sequence information using the advanced BLAST computer program, including version Magic-BLAST 1.2.0, available from the National Institutes of Health. The BLAST program is based on the alignment method discussed in Karl and Altschul (1990) Proc. Natl. Acad. Sci USA, 87:2264-68 (the contents of which are incorporated by reference in their entirety).

[0092] In some embodiments, the DD mutations identified herein may be mapped back to the ER sequence to identify DD hotspots. DD hotspots as used herein refer to amino acids within the ER of SEQ ID NO. 1 whose mutation results in the “responsive” nature of the stimulus responsive element generated from ER. The DD characteristics may be improved by saturation mutagenesis, which involves mutating the amino acids at the hotspot position to any of the known amino acids, including, but not limited to lysine, aspartic acid, glutamic acid, glutamine, asparagine, histidine, serine, threonine, tyrosine, cysteine, methionine, tryptophan, alanine, isoleucine, leucine, phenylalanine, valine, proline, and glycine. In some embodiments, the Asparagine at position 413 of SEQ ID NO. 1 may be mutated to any of the known amino acids (Table 2). In some embodiments, the Glutamine at position 502 of SEQ ID NO. 1 may be mutated to any of the known amino acids (Table 3).

[0093] The position of the mutated amino acids listed in Table 2 and Table 3 is relative to the wildtype human ER of SEQ ID NO. 1.

TABLE 2
N413 ER mutants

| | | | AA | NA |
|---|---|---|---|---|
| | | | SEQ | SEQ |
| ERDD- | | | ID | ID |
| ID | Mutations | AA sequence | NO. | NO. |
| ERDD- | ER (aa | SLALSLTADQMVSALLDAEPPILYSEYDPTRPFSEAS | 27 | 28 |
| 13 | 305-549 of | MMGLLTNLADRELVHMINWAKRVPGFVDLTLHDQ | | |
| | WT, L384M, | VHLLECAWMEILMIGLVWRSMEHPGKLLFAPNLLL | | |
| | N413F, | DRFQGKCVEGGVEIFDMLLATSSRFRMMNLQGEEF | | |
| | M421G, | VCLKSIILLNSGVYTFLSSTLKSLEEKDHIHRVLDKIT | | |
| | G521R, | DTLIHLMAKAGLTLQQQHQRLAQLLLILSHIRHMSN | | |
| | Y537S) | KRMEHLYSMKCKNVVPLSDLLLEMLDAHRL | | |
| ERDD- | ER (aa | SLALSLTADQMVSALLDAEPPILYSEYDPTRPFSEAS | 29 | 30 |
| 14 | 305-549 of | MMGLLTNLADRELVHMINWAKRVPGFVDLTLHDQ | | |
| | WT, L384M, | VHLLECAWMEILMIGLVWRSMEHPGKLLFAPNLLL | | |
| | N413L, | DRLQGKCVEGGVEIFDMLLATSSRFRMIMNLQGEEF | | |
| | M421G, | VCLKSIILLNSGVYTFLSSTLKSLEEKDHIHRVLDKIT | | |
| | G521R, | DTLIHLMAKAGLTLQQQHQRLAQLLLILSHIRHMSN | | |
| | Y537S) | KRMEHLYSMKCKNVVPLSDLLLEMLDAHRL | | |
| ERDD- | ER (aa | SLALSLTADQMVSALLDAEPPILYSEYDPTRPFSEAS | 31 | 32 |
| 15 | 305-549 of | MMGLLTNLADRELVHMINWAKRVPGFVDLTLHDQ | | |
| | WT, L384M, | VHLLECAWMEILMIGLVWRSMEHPGKLLFAPNLLL | | |
| | N413Y, | DRYQGKCVEGGVEIFDMLLATSSRFRMMNLQGEEF | | |
| | M421G, | VCLKSIILLNSGVYTFLSSTLKSLEEKDHIHRVLDKIT | | |
| | G521R, | DTLIHLMAKAGLTLQQQHQRLAQLLLILSHIRHMSN | | |
| | Y537S) | KRMEHLYSMKCKNVVPLSDLLLEMLDAHRL | | |
| ERDD- | ER (aa | SLALSLTADQMVSALLDAEPPILYSEYDPTRPFSEAS | 33 | 34 |
| 16 | 305-549 of | MMGLLTNLADRELVHMINWAKRVPGFVDLTLHDQ | | |
| | WT, L384M, | VHLLECAWMEILMIGLVWRSMEHPGKLLFAPNLLL | | |
| | N413H, | DRHQGKCVEGGVEIFDMLLATSSRFRMMNLQGEEF | | |
| | M421G, | VCLKSIILLNSGVYTFLSSTLKSLEEKDHIHRVLDKIT | | |
| | G521R, | DTLIHLMAKAGLTLQQQHQRLAQLLLILSHIRHMSN | | |
| | Y537S) | KRMEHLYSMKCKNVVPLSDLLLEMLDAHRL | | |
| ERDD- | ER (aa | SLALSLTADQMVSALLDAEPPILYSEYDPTRPFSEAS | 35 | 36 |
| 17 | 305-549 of | MMGLLTNLADRELVHMINWAKRVPGFVDLTLHDQ | | |
| | WT, L384M, | VHLLECAWMEILMIGLVWRSMEHPGKLLFAPNLLL | | |
| | N413Q, | DRQQGKCVEGGVEIFDMLLATSSRFRMMNLQGEEF | | |
| | M421G, | VCLKSIILLNSGVYTFLSSTLKSLEEKDHIHRVLDKIT | | |
| | G521R, | DTLIHLMAKAGLTLQQQHQRLAQLLLILSHIRHMSN | | |
| | Y537S) | KRMEHLYSMKCKNVVPLSDLLLEMLDAHRL | | |
| ERDD- | ER (aa | SLALSLTADQMVSALLDAEPPILYSEYDPTRPFSEAS | 37 | 38 |
| 18 | 305-549 of | MMGLLTNLADRELVHMINWAKRVPGFVDLTLHDQ | | |
| | WT, L384M, | VHLLECAWMEILMIGLVWRSMEHPGKLLFAPNLLL | | |
| | N413I, | DRIQGKCVEGGVEIFDMLLATSSRFRMMNLQGEEF | | |
| | M421G, | VCLKSIILLNSGVYTFLSSTLKSLEEKDHIHRVLDKIT | | |
| | G521R, | DTLIHLMAKAGLTLQQQHQRLAQLLLILSHIRHMSN | | |
| | Y537S) | KRMEHLYSMKCKNVVPLSDLLLEMLDAHRL | | |
| ERDD- | ER (aa | SLALSLTADQMVSALLDAEPPILYSEYDPTRPFSEAS | 39 | 40 |
| 19 | 305-549 of | MMGLLTNLADRELVHMINWAKRVPGFVDLTLHDQ | | |
| | WT, L384M, | VHLLECAWMEILMIGLVWRSMEHPGKLLFAPNLLL | | |
| | N413M, | DRMQGKCVEGGVEIFDMLLATSSRFRMMNLQGEE | | |
| | M421G, | FVCLKSIILLNSGVYTFLSSTLKSLEEKDHIHRVLDKI | | |
| | G521R, | TDTLIHLMAKAGLTLQQQHQRLAQLLLILSHIRHMS | | |
| | Y537S) | NKRMEHLYSMKCKNVVPLSDLLLEMLDAHRL | | |
| ERDD- | ER (aa | SLALSLTADQMVSALLDAEPPILYSEYDPTRPFSEAS | 41 | 42 |
| 20 | 305-549 of | MMGLLTNLADRELVHMINWAKRVPGFVDLTLHDQ | | |
| | WT, L384M, | VHLLECAWMEILMIGLVWRSMEHPGKLLFAPNLLL | | |
| | N413K, | DRKQGKCVEGGVEIFDMLLATSSRFRMMNLQGEEF | | |
| | M421G, | VCLKSIILLNSGVYTFLSSTLKSLEEKDHIHRVLDKIT | | |
| | G521R, | DTLIHLMAKAGLTLQQQHQRLAQLLLILSHIRHMSN | | |
| | Y537S) | KRMEHLYSMKCKNVVPLSDLLLEMLDAHRL | | |
| ERDD- | ER (aa | SLALSLTADQMVSALLDAEPPILYSEYDPTRPFSEAS | 43 | 44 |
| 21 | 305-549 of | MMGLLTNLADRELVHMINWAKRVPGFVDLTLHDQ | | |
| | WT, L384M, | VHLLECAWMEILMIGLVWRSMEHPGKLLFAPNLLL | | |
| | N413V, | DRVQGKCVEGGVEIFDMLLATSSRFRMMNLQGEEF | | |
| | M421G, | VCLKSIILLNSGVYTFLSSTLKSLEEKDHIHRVLDKIT | | |
| | G521R, | DTLIHLMAKAGLTLQQQHQRLAQLLLILSHIRHMSN | | |
| | Y537S) | KRMEHLYSMKCKNVVPLSDLLLEMLDAHRL | | |
| ERDD- | ER (aa | SLALSLTADQMVSALLDAEPPILYSEYDPTRPFSEAS | 45 | 46 |
| 22 | 305-549 of | MMGLLTNLADRELVHMINWAKRVPGFVDLTLHDQ | | |
| | WT, L384M, | VHLLECAWMEILMIGLVWRSMEHPGKLLFAPNLLL | | |
| | N413S, | DRSQGKCVEGGVEIFDMLLATSSRFRMMNLQGEEF | | |
| | M421G, | VCLKSIILLNSGVYTFLSSTLKSLEEKDHIHRVLDKIT | | |
| | G521R, | DTLIHLMAKAGLTLQQQHQRLAQLLLILSHIRHMSN | | |
| | Y537S) | KRMEHLYSMKCKNVVPLSDLLLEMLDAHRL | | |
| ERDD- | ER (aa | SLALSLTADQMVSALLDAEPPILYSEYDPTRPFSEAS | 47 | 48 |
| 23 | 305-549 of | MMGLLTNLADRELVHMINWAKRVPGFVDLTLHDQ | | |
| | WT, L384M, | VHLLECAWMEILMIGLVWRSMEHPGKLLFAPNLLL | | |
| | N413C, | DRCQGKCVEGGVEIFDMLLATSSRFRMMNLQGEEF | | |
| | M421G, | VCLKSIILLNSGVYTFLSSTLKSLEEKDHIHRVLDKIT | | |
| | G521R, | DTLIHLMAKAGLTLQQQHQRLAQLLLILSHIRHMSN | | |
| | Y537S) | KRMEHLYSMKCKNVVPLSDLLLEMLDAHRL | | |
| ERDD- | ER (aa | SLALSLTADQMVSALLDAEPPILYSEYDPTRPFSEAS | 49 | 50 |
| 24 | 305-549 of | MMGLLTNLADRELVHMINWAKRVPGFVDLTLHDQ | | |
| | WT, L384M, | VHLLECAWMEILMIGLVWRSMEHPGKLLFAPNLLL | | |
| | N413W, | DRWQGKCVEGGVEIFDMLLATSSRFRMIMNLQGEE | | |
| | M421G, | FVCLKSIILLNSGVYTFLSSTLKSLEEKDHIHRVLDKI | | |
| | G521R, | TDTLIHLMAKAGLTLQQQHQRLAQLLLILSHIRHMS | | |
| | Y537S) | NKRMEHLYSMKCKNVVPLSDLLLEMLDAHRL | | |
| ERDD- | ER (aa | SLALSLTADQMVSALLDAEPPILYSEYDPTRPFSEAS | 51 | 52 |
| 25 | 305-549 of | MMGLLTNLADRELVHMINWAKRVPGFVDLTLHDQ | | |
| | WT, L384M, | VHLLECAWMEILMIGLVWRSMEHPGKLLFAPNLLL | | |
| | N413P, | DRPQGKCVEGGVEIFDMLLATSSRFRMMNLQGEEF | | |
| | M421G, | VCLKSIILLNSGVYTFLSSTLKSLEEKDHIHRVLDKIT | | |
| | G521R, | DTLIHLMAKAGLTLQQQHQRLAQLLLILSHIRHMSN | | |
| | Y537S) | KRMEHLYSMKCKNVVPLSDLLLEMLDAHRL | | |
| ERDD- | ER (aa | SLALSLTADQMVSALLDAEPPILYSEYDPTRPFSEAS | 53 | 54 |
| 26 | 305-549 of | MMGLLTNLADRELVHMINWAKRVPGFVDLTLHDQ | | |
| | WT, L384M, | VHLLECAWMEILMIGLVWRSMEHPGKLLFAPNLLL | | |
| | N413R, | DRRQGKCVEGGVEIFDMLLATSSRFRMMNLQGEEF | | |
| | M421G, | VCLKSIILLNSGVYTFLSSTLKSLEEKDHIHRVLDKIT | | |
| | G521R, | DTLIHLMAKAGLTLQQQHQRLAQLLLILSHIRHMSN | | |
| | Y537S) | KRMEHLYSMKCKNVVPLSDLLLEMLDAHRL | | |
| ERDD- | ER (aa | SLALSLTADQMVSALLDAEPPILYSEYDPTRPFSEAS | 55 | 56 |
| 27 | 305-549 of | MMGLLTNLADRELVHMINWAKRVPGFVDLTLHDQ | | |
| | WT, L384M, | VHLLECAWMEILMIGLVWRSMEHPGKLLFAPNLLL | | |
| | N413T, | DRTQGKCVEGGVEIFDMLLATSSRFRMIMNLQGEEF | | |
| | M421G, | VCLKSIILLNSGVYTFLSSTLKSLEEKDHIHRVLDKIT | | |
| | G521R, | DTLIHLMAKAGLTLQQQHQRLAQLLLILSHIRHMSN | | |
| | Y537S) | KRMEHLYSMKCKNVVPLSDLLLEMLDAHRL | | |
| ERDD- | ER (aa | SLALSLTADQMVSALLDAEPPILYSEYDPTRPFSEAS | 57 | 58 |
| 28 | 305-549 of | MMGLLTNLADRELVHMINWAKRVPGFVDLTLHDQ | | |
| | WT, L384M, | VHLLECAWMEILMIGLVWRSMEHPGKLLFAPNLLL | | |
| | N413A, | DRAQGKCVEGGVEIFDMLLATSSRFRMMNLQGEEF | | |
| | M421G, | VCLKSIILLNSGVYTFLSSTLKSLEEKDHIHRVLDKIT | | |
| | G521R, | DTLIHLMAKAGLTLQQQHQRLAQLLLILSHIRHMSN | | |
| | Y537S) | KRMEHLYSMKCKNVVPLSDLLLEMLDAHRL | | |
| ERDD- | ER (aa | SLALSLTADQMVSALLDAEPPILYSEYDPTRPFSEAS | 59 | 60 |
| 29 | 305-549 of | MMGLLTNLADRELVHMINWAKRVPGFVDLTLHDQ | | |
| | WT, L384M, | VHLLECAWMEILMIGLVWRSMEHPGKLLFAPNLLL | | |
| | N413E, | DREQGKCVEGGVEIFDMLLATSSRFRMMNLQGEEF | | |
| | M421G, | VCLKSIILLNSGVYTFLSSTLKSLEEKDHIHRVLDKIT | | |
| | G521R, | DTLIHLMAKAGLTLQQQHQRLAQLLLILSHIRHMSN | | |
| | Y537S) | KRMEHLYSMKCKNVVPLSDLLLEMLDAHRL | | |
| ERDD- | ER (aa | SLALSLTADQMVSALLDAEPPILYSEYDPTRPFSEAS | 61 | 62 |
| 30 | 305-549 of | MMGLLTNLADRELVHMINWAKRVPGFVDLTLHDQ | | |
| | WT, L384M, | VHLLECAWMEILMIGLVWRSMEHPGKLLFAPNLLL | | |
| | N413G, | DRGQGKCVEGGVEIFDMLLATSSRFRMMNLQGEEF | | |
| | M421G, | VCLKSIILLNSGVYTFLSSTLKSLEEKDHIHRVLDKIT | | |
| | G521R, | DTLIHLMAKAGLTLQQQHQRLAQLLLILSHIRHMSN | | |
| | Y537S) | KRMEHLYSMKCKNVVPLSDLLLEMLDAHRL | | |

TABLE 3
Q502 ER mutants

| | | | AA | NA |
|---|---|---|---|---|
| | | | SEQ | SEQ |
| ERDD- | | | ID | ID |
| ID | Mutations | AA sequence | NO. | NO. |
| ERDD- | ER (aa | SLALSLTADQMVSALLDAEPPILYSEYDPTRPFSEAS | 63 | 64 |
| 31 | 305-549 of WT, | MMGLLTNLADRELVHMINWAKRVPGFVDLTLHDQ | | |
| | L384M, | VHLLECAWMEILMIGLVWRSMEHPGKLLFAPNLLL | | |
| | M421G, | DRNQGKCVEGGVEIFDMLLATSSRFRMMNLQGEEF | | |
| | Q502F, | VCLKSIILLNSGVYTFLSSTLKSLEEKDHIHRVLDKIT | | |
| | G521R, | DTLIHLMAKAGLTLQQQHFRLAQLLLILSHIRHMSN | | |
| | Y537S) | KRMEHLYSMKCKNVVPLSDLLLEMLDAHRL | | |
| ERDD- | ER (aa | SLALSLTADQMVSALLDAEPPILYSEYDPTRPFSEAS | 65 | 66 |
| 32 | 305-549 of WT, | MMGLLTNLADRELVHMINWAKRVPGFVDLTLHDQ | | |
| | L384M, | VHLLECAWMEILMIGLVWRSMEHPGKLLFAPNLLL | | |
| | M421G, | DRNQGKCVEGGVEIFDMLLATSSRFRMMNLQGEEF | | |
| | Q502L, | VCLKSIILLNSGVYTFLSSTLKSLEEKDHIHRVLDKIT | | |
| | G521R, | DTLIHLMAKAGLTLQQQHLRLAQLLLILSHIRHMSN | | |
| | Y537S) | KRMEHLYSMKCKNVVPLSDLLLEMLDAHRL | | |
| ERDD- | ER (aa | SLALSLTADQMVSALLDAEPPILYSEYDPTRPFSEAS | 67 | 68 |
| 33 | 305-549 of WT, | MMGLLTNLADRELVHMINWAKRVPGFVDLTLHDQ | | |
| | L384M, | VHLLECAWMEILMIGLVWRSMEHPGKLLFAPNLLL | | |
| | M421G, | DRNQGKCVEGGVEIFDMLLATSSRFRMMNLQGEEF | | |
| | Q502Y, | VCLKSIILLNSGVYTFLSSTLKSLEEKDHIHRVLDKIT | | |
| | G521R, | DTLIHLMAKAGLTLQQQHYRLAQLLLILSHIRHMSN | | |
| | Y537S) | KRMEHLYSMKCKNVVPLSDLLLEMLDAHRL | | |
| ERDD- | ER (aa | SLALSLTADQMVSALLDAEPPILYSEYDPTRPFSEAS | 69 | 70 |
| 34 | 305-549 of WT, | MMGLLTNLADRELVHMINWAKRVPGFVDLTLHDQ | | |
| | L384M, | VHLLECAWMEILMIGLVWRSMEHPGKLLFAPNLLL | | |
| | M421G, | DRNQGKCVEGGVEIFDMLLATSSRFRMMNLQGEEF | | |
| | Q502H, | VCLKSIILLNSGVYTFLSSTLKSLEEKDHIHRVLDKIT | | |
| | G521R, | DTLIHLMAKAGLTLQQQHHRLAQLLLILSHIRHMSN | | |
| | Y537S) | KRMEHLYSMKCKNVVPLSDLLLEMLDAHRL | | |
| ERDD- | ER (aa | SLALSLTADQMVSALLDAEPPILYSEYDPTRPFSEAS | 71 | 72 |
| 35 | 305-549 of WT, | MMGLLTNLADRELVHMINWAKRVPGFVDLTLHDQ | | |
| | L384M, | VHLLECAWMEILMIGLVWRSMEHPGKLLFAPNLLL | | |
| | M421G, | DRNQGKCVEGGVEIFDMLLATSSRFRMMNLQGEEF | | |
| | Q502I, | VCLKSIILLNSGVYTFLSSTLKSLEEKDHIHRVLDKIT | | |
| | G521R, | DTLIHLMAKAGLTLQQQHIRLAQLLLILSHIRHMSN | | |
| | Y537S) | KRMEHLYSMKCKNVVPLSDLLLEMLDAHRL | | |
| ERDD- | ER (aa | SLALSLTADQMVSALLDAEPPILYSEYDPTRPFSEAS | 73 | 74 |
| 36 | 305-549 of WT, | MMGLLTNLADRELVHMINWAKRVPGFVDLTLHDQ | | |
| | L384M, | VHLLECAWMEILMIGLVWRSMEHPGKLLFAPNLLL | | |
| | M421G, | DRNQGKCVEGGVEIFDMLLATSSRFRMMNLQGEEF | | |
| | Q502M, | VCLKSIILLNSGVYTFLSSTLKSLEEKDHIHRVLDKIT | | |
| | G521R, | DTLIHLMAKAGLTLQQQHMRLAQLLLILSHIRHMS | | |
| | Y537S) | NKRMEHLYSMKCKNVVPLSDLLLEMLDAHRL | | |
| ERDD- | ER (aa | SLALSLTADQMVSALLDAEPPILYSEYDPTRPFSEAS | 75 | 76 |
| 37 | 305-549 of WT, | MMGLLTNLADRELVHMINWAKRVPGFVDLTLHDQ | | |
| | L384M, | VHLLECAWMEILMIGLVWRSMEHPGKLLFAPNLLL | | |
| | M421G, | DRNQGKCVEGGVEIFDMLLATSSRFRMMNLQGEEF | | |
| | Q502N, | VCLKSIILLNSGVYTFLSSTLKSLEEKDHIHRVLDKIT | | |
| | G521R, | DTLIHLMAKAGLTLQQQHNRLAQLLLILSHIRHMSN | | |
| | Y537S) | KRMEHLYSMKCKNVVPLSDLLLEMLDAHRL | | |
| ERDD- | ER (aa | SLALSLTADQMVSALLDAEPPILYSEYDPTRPFSEAS | 77 | 78 |
| 38 | 305-549 of WT, | MMGLLTNLADRELVHMINWAKRVPGFVDLTLHDQ | | |
| | L384M, | VHLLECAWMEILMIGLVWRSMEHPGKLLFAPNLLL | | |
| | M421G, | DRNQGKCVEGGVEIFDMLLATSSRFRMMNLQGEEF | | |
| | Q502K, | VCLKSIILLNSGVYTFLSSTLKSLEEKDHIHRVLDKIT | | |
| | G521R, | DTLIHLMAKAGLTLQQQHKRLAQLLLILSHIRHMSN | | |
| | Y537S) | KRMEHLYSMKCKNVVPLSDLLLEMLDAHRL | | |
| ERDD- | ER (aa | SLALSLTADQMVSALLDAEPPILYSEYDPTRPFSEAS | 79 | 80 |
| 39 | 305-549 of WT, | MMGLLTNLADRELVHMINWAKRVPGFVDLTLHDQ | | |
| | L384M, | VHLLECAWMEILMIGLVWRSMEHPGKLLFAPNLLL | | |
| | M421G, | DRNQGKCVEGGVEIFDMLLATSSRFRMMNLQGEEF | | |
| | Q502V, | VCLKSIILLNSGVYTFLSSTLKSLEEKDHIHRVLDKIT | | |
| | G521R, | DTLIHLMAKAGLTLQQQHVRLAQLLLILSHIRHMSN | | |
| | Y537S) | KRMEHLYSMKCKNVVPLSDLLLEMLDAHRL | | |
| ERDD- | ER (aa | SLALSLTADQMVSALLDAEPPILYSEYDPTRPFSEAS | 81 | 82 |
| 40 | 305-549 of WT, | MMGLLTNLADRELVHMINWAKRVPGFVDLTLHDQ | | |
| | L384M, | VHLLECAWMEILMIGLVWRSMEHPGKLLFAPNLLL | | |
| | M421G, | DRNQGKCVEGGVEIFDMLLATSSRFRMMNLQGEEF | | |
| | Q502S, | VCLKSIILLNSGVYTFLSSTLKSLEEKDHIHRVLDKIT | | |
| | G521R, | DTLIHLMAKAGLTLQQQHSRLAQLLLILSHIRHMSN | | |
| | Y537S) | KRMEHLYSMKCKNVVPLSDLLLEMLDAHRL | | |
| ERDD- | ER (aa | SLALSLTADQMVSALLDAEPPILYSEYDPTRPFSEAS | 83 | 84 |
| 41 | 305-549 of WT, | MMGLLTNLADRELVHMINWAKRVPGFVDLTLHDQ | | |
| | L384M, | VHLLECAWMEILMIGLVWRSMEHPGKLLFAPNLLL | | |
| | M421G, | DRNQGKCVEGGVEIFDMLLATSSRFRMMNLQGEEF | | |
| | Q502C, | VCLKSIILLNSGVYTFLSSTLKSLEEKDHIHRVLDKIT | | |
| | G521R, | DTLIHLMAKAGLTLQQQHCRLAQLLLILSHIRHMSN | | |
| | Y537S) | KRMEHLYSMKCKNVVPLSDLLLEMLDAHRL | | |
| ERDD- | ER (aa | SLALSLTADQMVSALLDAEPPILYSEYDPTRPFSEAS | 85 | 86 |
| 42 | 305-549 of WT, | MMGLLTNLADRELVHMINWAKRVPGFVDLTLHDQ | | |
| | L384M, | VHLLECAWMEILMIGLVWRSMEHPGKLLFAPNLLL | | |
| | M421G, | DRNQGKCVEGGVEIFDMLLATSSRFRMMNLQGEEF | | |
| | Q502W, | VCLKSIILLNSGVYTFLSSTLKSLEEKDHIHRVLDKIT | | |
| | G521R, | DTLIHLMAKAGLTLQQQHWRLAQLLLILSHIRHMS | | |
| | Y537S) | NKRMEHLYSMKCKNVVPLSDLLLEMLDAHRL | | |
| ERDD- | ER (aa | SLALSLTADQMVSALLDAEPPILYSEYDPTRPFSEAS | 87 | 88 |
| 43 | 305-549 of WT, | MMGLLTNLADRELVHMINWAKRVPGFVDLTLHDQ | | |
| | L384M, | VHLLECAWMEILMIGLVWRSMEHPGKLLFAPNLLL | | |
| | M421G, | DRNQGKCVEGGVEIFDMLLATSSRFRMMNLQGEEF | | |
| | Q502P, | VCLKSIILLNSGVYTFLSSTLKSLEEKDHIHRVLDKIT | | |
| | G521R, | DTLIHLMAKAGLTLQQQHPRLAQLLLILSHIRHMSN | | |
| | Y537S) | KRMEHLYSMKCKNVVPLSDLLLEMLDAHRL | | |
| ERDD- | ER (aa | SLALSLTADQMVSALLDAEPPILYSEYDPTRPFSEAS | 89 | 90 |
| 44 | 305-549 of WT, | MMGLLTNLADRELVHMINWAKRVPGFVDLTLHDQ | | |
| | L384M, | VHLLECAWMEILMIGLVWRSMEHPGKLLFAPNLLL | | |
| | M421G, | DRNQGKCVEGGVEIFDMLLATSSRFRMMNLQGEEF | | |
| | Q502T, | VCLKSIILLNSGVYTFLSSTLKSLEEKDHIHRVLDKIT | | |
| | G521R, | DTLIHLMAKAGLTLQQQHTRLAQLLLILSHIRHMSN | | |
| | Y537S) | KRMEHLYSMKCKNVVPLSDLLLEMLDAHRL | | |
| ERDD- | ER (aa | SLALSLTADQMVSALLDAEPPILYSEYDPTRPFSEAS | 91 | 92 |
| 45 | 305-549 of WT, | MMGLLTNLADRELVHMINWAKRVPGFVDLTLHDQ | | |
| | L384M, | VHLLECAWMEILMIGLVWRSMEHPGKLLFAPNLLL | | |
| | M421G, | DRNQGKCVEGGVEIFDMLLATSSRFRMMNLQGEEF | | |
| | Q502A, | VCLKSIILLNSGVYTFLSSTLKSLEEKDHIHRVLDKIT | | |
| | G521R, | DTLIHLMAKAGLTLQQQHARLAQLLLILSHIRHMSN | | |
| | Y537S) | KRMEHLYSMKCKNVVPLSDLLLEMLDAHRL | | |
| ERDD- | ER (aa | SLALSLTADQMVSALLDAEPPILYSEYDPTRPFSEAS | 93 | 94 |
| 46 | 305-549 of WT, | MMGLLTNLADRELVHMINWAKRVPGFVDLTLHDQ | | |
| | L384M, | VHLLECAWMEILMIGLVWRSMEHPGKLLFAPNLLL | | |
| | M421G, | DRNQGKCVEGGVEIFDMLLATSSRFRMMNLQGEEF | | |
| | Q502D, | VCLKSIILLNSGVYTFLSSTLKSLEEKDHIHRVLDKIT | | |
| | G521R, | DTLIHLMAKAGLTLQQQHDRLAQLLLILSHIRHMSN | | |
| | Y537S) | KRMEHLYSMKCKNVVPLSDLLLEMLDAHRL | | |
| ERDD- | ER (aa | SLALSLTADQMVSALLDAEPPILYSEYDPTRPFSEAS | 95 | 96 |
| 47 | 305-549 of WT, | MMGLLTNLADRELVHMINWAKRVPGFVDLTLHDQ | | |
| | L384M, | VHLLECAWMEILMIGLVWRSMEHPGKLLFAPNLLL | | |
| | M421G, | DRNQGKCVEGGVEIFDMLLATSSRFRMMNLQGEEF | | |
| | Q502E, | VCLKSIILLNSGVYTFLSSTLKSLEEKDHIHRVLDKIT | | |
| | G521R, | DTLIHLMAKAGLTLQQQHERLAQLLLILSHIRHMSN | | |
| | Y537S) | KRMEHLYSMKCKNVVPLSDLLLEMLDAHRL | | |
| ERDD- | ER (aa | SLALSLTADQMVSALLDAEPPILYSEYDPTRPFSEAS | 97 | 98 |
| 48 | 305-549 of WT, | MMGLLTNLADRELVHMINWAKRVPGFVDLTLHDQ | | |
| | L384M, | VHLLECAWMEILMIGLVWRSMEHPGKLLFAPNLLL | | |
| | M421G, | DRNQGKCVEGGVEIFDMLLATSSRFRMMNLQGEEF | | |
| | Q502G, | VCLKSIILLNSGVYTFLSSTLKSLEEKDHIHRVLDKIT | | |
| | G521R, | DTLIHLMAKAGLTLQQQHGRLAQLLLILSHIRHMSN | | |
| | Y537S) | KRMEHLYSMKCKNVVPLSDLLLEMLDAHRL | | |

[0094] In some embodiments. ER destabilizing mutants may be discovered by random mutagenesis of the wildtype human ER using error prone polymerase chain reaction (PCR). The destabilization of the mutants in the absence of its binding ligand may be tested. Binding to ER ligands, Bazedoxifene to human ER may be tested to characterize ligand dependent stabilization.

[0095] In some embodiments, the DDs may be derived from ER by mutating one or more amino acids residues between positions 305-315, 315-325, 325-335, 335-345, 345-355, 355-365, 365-375, 375-385, 385-395, 395-405, 405-415, 415-425, 425-435, 435-445, 445-455, 455-465, 465-475, 475-485, 485-495, 495-505, 505-515, 515-525, 525-535, 535-545, and 545-555 of human ER wild type protein (SEQ ID NO. 1). In some embodiments, the mutation may be a conserved (with similar physicochemical properties as the amino acid at the mutation site), a semi conserved (e.g. negatively to positively charge amino acid) or a non-conserved (amino acid with different physicochemical properties than the amino acid at the mutation site). Regions or portions or domains of wild type proteins may be utilized as SREs/DDs in whole or in part. They may be combined or rearranged to create new peptides, proteins, regions or domains of which any may be used as SREs/DDs or the starting point for the design of further SREs and/or DDs.

[0096] In some embodiments, variant libraries may be generated by methods known in the art. In one embodiment, VariantFind™ may be used to generate variant library. The VariantFind™ platform is a series of multiplex PCRs that mutates multiple amino acid positions simultaneously. Desired mutations are directly encoded by oligonucleotides, providing high control and specificity during the mutagenesis process. These oligonucleotides are combined in a series of sequential PCRs that result in a ready-to-clone DNA library encoding all desired mutations. In one embodiment, any of the codons in the polynucleotides of the disclosure may be altered by saturation mutagenesis. In another embodiment, a ruleset for amino acid changes may be used to mutate select amino acids of the DDs. In one embodiment, the rule may be the mutation of all Arginine residues in the DD to alanine, lysine and/or leucine. In other embodiments, all phenyl alanine residues in the DD may be mutated to alanine, leucine and/or threonine.

[0097] The destabilization domains described herein may also include amino acid and nucleotide substitutions that do not affect stability, including conservative, non-conservative substitutions and or polymorphisms.

[0098] In some embodiments, DD mutations that do not inhibit ligand binding may be preferentially selected. In some embodiments, ligand binding may be improved by mutation of residues in ER.

[0099] In one embodiment, the ER derived DD may be truncated and the smallest ER based DD may be identified. In some embodiments, ER DDs described herein may also be fragments of the above destabilizing domains, including fragments containing variant amino acid sequences. Preferred fragments are unstable in the absence of the stimulus and stabilized upon addition of the stimulus. Preferred fragments retain the ability to interact with the stimulus with similar efficiency as the DDs described herein.

[0100] In some embodiments, the ER mutant may comprise one or more mutations in an amino acid at the mutation site being identical to one or more vicinal amino acids. The vicinal amino acid may be selected from, but not limited to one, two, three, four, and five amino acids, upstream or downstream from the mutation.

[0101] In some embodiments, the ER-derived SRE of the effector module may exhibit both a destabilization ratio between 0 and 0.09 and a destabilizing mutation co-efficient between 0.09. The destabilization ratio may comprise the ratio of expression, function or level of the payload in the absence of the stimulus specific to the ER-derived SRE to the expression, function or level of the payload that is expressed constitutively in the absence of the same stimulus. The destabilizing mutation co-efficient may comprise the ratio of expression, function or level of the payload when operably linked to the ER-derived SRE, in the absence of the stimulus specific to the ER-derived SRE; to the expression, function or level of the payload when operably linked to the wildtype protein from which the ER-derived SRE is derived and in the absence of the same stimulus. In one aspect, the ER-derived SRE of the effector module may stabilize the payload by a stabilization ratio of 1 or more. The stabilization ratio may be the ratio of expression, function or level of the payload in the presence of the stimulus to the expression, function or level of the payload in the absence of the stimulus.

### Protein to Protein Interactions

[0102] In some embodiments, the stimulus response element may be destabilized by the stimulus. In some embodiments, SREs may be derived from protein complexes that comprise at least one protein-protein interaction. In other aspects, the SRE may form a protein-protein interaction with a natural protein within the cell. Protein complexes reduce the exposure of the constituent proteins to the risk of undesired oligomerization by reducing the concentration of the free monomeric state. Payloads appended to such SREs may stabilized in the absence of the stimulus. In some aspects, the stimulus may be a small molecule that is capable of interrupting or disrupting the protein-protein interactions related to the SRE. In such instances, addition of the stimulus, results in the reduced expression and/or function of the payload. In some embodiments, stimuli that induce conformational change of the SRE may be utilized. In one aspect, the SRE may be stabilized by the conformational change. In another aspect, the SRE may be destabilized by the conformational change. The stimuli may also be small molecules that disrupt post translational modification of SREs which may result in the disruption of the protein-protein interaction related to the SRE. In some embodiments, SREs may be identified using protein interactomic techniques known in the art. Such methods may enable the identification of protein interactions that are therapeutically relevant. Any of the large-scale quantitative proteomics methods described in International Patent Publication NOs. WO2017210427A1, WO2016196994A9, and WO2014200987A3 may be useful in the present disclosure (the contents of each of which are incorporated by reference in their entirety).

### Stimulus

[0103] Biocircuits of the disclosure are triggered by one or more stimuli. Stimuli may be selected from a ligand, an externally added or endogenous metabolite, the presence or absence of a defined ligand, pH, temperature, light, ionic strength, radioactivity, cellular location, subject site, microenvironment, the presence or the concentration of one or more metal ions.

[0104] In some embodiments, the stimulus is a ligand. Ligands may be nucleic acid-based, protein-based, lipid based, organic, inorganic or any combination of the foregoing. In some embodiments, the ligand is selected from the group consisting of a protein, peptide, nucleic acid, lipid, lipid derivative, sterol, steroid, metabolite derivative and a small molecule. In some embodiments, the stimulus is a small molecule. In some embodiments, the small molecules are cell permeable. Ligands useful in the present disclosure include without limitation, any of those taught in Table 2 of co-pending commonly owned U.S. Ser. No. 62/320,864 filed on Apr. 11, 2016, 62/466,596 filed Mar. 3, 2017 and the International Publication WO2017/180587, the contents of each of which are incorporated herein by reference in their entirety. In some embodiments, the small molecules are FDA-approved, safe and orally administered.

[0105] In some embodiments, the ligand binds to ER. Ligands may be agonists or antagonists. In some embodiments, the ligand binds to and inhibits ER function and is herein referred to as a ER inhibitor. In some embodiments, the ligand may be a selective inhibitor of human ER. Ligands of the disclosure may also be selective inhibitors of ER of other species. Ligands specific to other ER may be modified to improve binding to ER.

[0106] Ligands may be ER agonists such as but not limited to endogenous estrogen 17b-estradiol (E2) and the synthetic nonsteroidal estrogen diethylstilbestrol (DES). In some embodiments. The ligands may be ER antagonists, such as ICI-164,384, RU486, tamoxifen, 4-hydroxytamoxifen (4-OHT), fulvestrant, oremifene, lasofoxifene, clomifene, femarelle and ormeloxifene and raloxifene (RAL).

[0107] In some embodiments, the stimulus of the current disclosure may be ER antagonists such as, but not limited to Bazedoxifene and/or Raloxifene. In some embodiments, the ER antagonist may be Duavee, which is Bazedoxifene conjugated with estrogen. In one embodiment, the ER antagonist may be administered at clinically approved doses. Non limiting examples include Duavee, which may be administered at 20 mg (daily) and Raloxifene may be administered at 60 mg (daily).

[0108] In some embodiments, synthetic ligands CMP1, CMP2, CMP3, CMP4, CMP5, CMP6, CMP7, and CMP8 described by Gallinari et al. (2005) Chem. & Biol., Vol. 12, 883-893 AND Miyazaki et al. (2012) J Am Chem Soc. March 7; 134(9):3942-5 (the contents of each of which are herein incorporated by reference in their entirety).

[0109] Ligands may also be selected from but not limited to 2,3-Diaryl Isoquinolinone Bisphenol A, bisphenol AF, HPTE, CMPD3, CMPD6, CMPD9, Hydrazide derivatives, Fluoren-3-one derivatives, Triphenylethylene Coumarin, 1,1,2-Triarylolefine derivatives, aptamer modulators of estrogen receptors, Carborane analogues, pyrazole-based ligands (propyl-pyrazole-triol (PPT) and methyl-piperidino-pyrazole (MPP)).

[0110] In some embodiments, ligands of the present disclosure may be polyglutamate or non polyglutamylatable. Like naturally occurring folates, polyglutamatable folates also contain a glutamic acid residue and therefore undergo intracellular polyglutamylation. In contrast, non-polyglutamatable antifolates are devoid of a glutamate residue and thus are not available for polyglutamylation. In some embodiments, polyglutamylatable ligands may be preferred to increase intracellular retention as they can no longer be exported out of the cell. In other embodiments, non polyglutamylatable ligands may be preferred to decrease intracellular retention.

[0111] In one embodiment, the ligands of the present disclosure may be FDA approved ligands capable of binding to the specific DDs or target regions within the DDs. In other embodiments, FDA approved ligands may be used to screen potential binders in the human protein. DDs may be designed based on the positive hits from the screen using the portion of the protein that binds to the ligand. In one embodiment, proteins that bind to FDA approved ligands as off target interactions may be used to design DDs of the present disclosure.

[0112] In some embodiments, ligands include Bazedoxifene-derived ligands containing portions of the ligand known to mediate binding to ER. Ligands may also be modified to reduce off-target binding to other folate metabolism enzymes and increase specific binding to ER derived DDs.

[0113] In some embodiments, the ligand selection is determined by the magnitude and duration of expression of the effector modules of the disclosure using the PK parameters. In some embodiments, high levels of expression of the payload for a short duration of time may be desired. In some embodiments, high levels of expression of the payload may be desired for a long duration. In some embodiments, low levels of expression of the payload may be desired for a long duration of time. In some embodiments, low levels of expression for a short duration of time may be desired. In such instances, TMP may be used as the ligand.

[0114] Ligands may also be selected from the analysis of the dependence of a known ER ligand on its molecular/chemical structure, through Structure Activity Relationships (SAR) study. Any of the methods related to SAR, known in art may be utilized to identify stabilizing ligands of the disclosure. SAR may be utilized to improve properties of the ligand such as specificity, potency, pharmacokinetics, bioavailability, and safety. SAR analysis of known ER ligands may also be combined with computational strategies and the high-resolution X ray structures of ER complexed with ligands may be used to develop compounds that can fit these criteria.

[0115] In one embodiment, the ligand may not be capable of suppressing the immune system i.e. the ligand may be non-immunosuppressive.

### Payloads

[0116] According to the present disclosure, payloads can be any natural protein in an organism genome, a fusion polypeptide, an antibody, or variants, mutants and derivatives thereof

### 1. Protein of Interest

[0117] In some embodiments, payloads of the disclosure may be a natural protein in an organism genome, or variants, mutants, derivatives thereof. The natural protein may be from, for example, a mammalian organism, a bacterium, and a virus.

[0118] In one example, the payload may be a protein of interest, or a polypeptide from human genome.

[0119] In some embodiments, the payload of the present disclosure may be cardiac lineage specification factors such as eomesodermin (EOMES), a T-box transcription factor; WNT signaling pathway components such as WNT3 and WNT 3A. EOMES is crucially required for the development of the heart. Cardiomyocyte programming by EOMES involves autocrine activation of the canonical WNT signaling pathway and vice versa. Under conditions that are conducive to promoting cardiac lineage, WNT signaling activates EOMES and EOMES in turn promotes WNT signaling creating a self-sustaining loop that promotes the cardiac lineage. An activation loop that is too weak or too strong promotes non-cardiac fates such as endodermal and other mesodermal fates respectively. The DDs of the present disclosure may be used to tune EOMES and WNT payload levels to generate an activation loop that initiate and/or sustain cardiac specification during gastrulation.

[0120] In some embodiments, the payload may be a fusion protein comprising any of the immunotherapeutic agents described and ubiquitin. Within the fusion protein, the ubiquitin may be positioned at the N terminus and the immunotherapeutic agent may be positioned at the C terminus. In one aspect, the immunotherapeutic agent may itself be a fusion protein and the ubiquitin may be located in between the proteins that are fused. The payloads may include a single ubiquitin protein or a chain of ubiquitin proteins. The ubiquitin protein may be linked to the immunotherapeutic agent through a single amino acid. The selection of the single amino acid may depend on the desired half-life of the fusion protein. In one embodiment, the immunotherapeutic agent may be IL12.

### 2. Antibodies, Antibody Fragments and Variants

[0121] In some embodiments, payloads of the disclosure may be an antibody or fragments thereof. Antibodies useful in this method include without limitation, any of those taught in co-pending commonly owned U.S. Provisional Patent Application No. 62/320,864 filed on Apr. 11, 2016, or in U.S. Provisional Application No. 62/466,596 filed Mar. 3, 2017 and the International Publication WO2017/180587, the contents of each of which are incorporated herein by reference in their entirety.

[0122] The antibody may be an intact antibody, an antibody light chain, antibody heavy chain, an antibody fragment, an antibody variant, or an antibody derivative.

[0123] For the purposes herein, an “antibody” may comprise a heavy and light variable domain as well as an Fc region. As used herein, the term “native antibody” refers to a usually heterotetrameric glycoprotein of about 150,000 Daltons, composed of two identical light (L) chains and two identical heavy (H) chains. Genes encoding antibody heavy and light chains are known and segments making up each have been well characterized and described (Matsuda et al., The Journal of Experimental Medicine. 1998, 188(11): 2151-62 and Li et al., Blood, 2004, 103(12): 4602-4609; the content of each of which are herein incorporated by reference in their entirety). Each light chain is linked to a heavy chain by one covalent disulfide bond, while the number of disulfide linkages varies among the heavy chains of different immunoglobulin isotypes. Each heavy and light chain also has regularly spaced intrachain disulfide bridges. Each heavy chain has at one end a variable domain (VH) followed by a number of constant domains. Each light chain has a variable domain at one end (VL) and a constant domain at its other end; the constant domain of the light chain is aligned with the first constant domain of the heavy chain, and the light chain variable domain is aligned with the variable domain of the heavy chain.

[0124] As used herein, the term “variable domain” refers to specific antibody domains found on both the antibody heavy and light chains that differ extensively in sequence among antibodies and are used in the binding and specificity of each particular antibody for its particular antigen. Variable domains comprise hypervariable regions. As used herein, the term “hypervariable region” refers to a region within a variable domain comprising amino acid residues responsible for antigen binding. The amino acids present within the hypervariable regions determine the structure of the complementarity determining regions (CDRs) that become part of the antigen-binding site of the antibody. As used herein, the term “CDR” refers to a region of an antibody comprising a structure that is complimentary to its target antigen or epitope. Other portions of the variable domain, not interacting with the antigen, are referred to as framework (FW) regions. The antigen-binding site (also known as the antigen combining site or paratope) comprises the amino acid residues necessary to interact with a particular antigen. The exact residues making up the antigen-binding site are typically elucidated by co-crystallography with bound antigen, however computational assessments can also be used based on comparisons with other antibodies (Strohl, W. R. Therapeutic Antibody Engineering. Woodhead Publishing, Philadelphia Pa. 2012. Ch. 3, p47-54, the contents of which are herein incorporated by reference in their entirety). Determining residues making up CDRs may include the use of numbering schemes including, but not limited to, those taught by Kabat (Wu et al., JEM, 1970, 132(2):211-250 and Johnson et al., Nucleic Acids Res. 2000, 28(1): 214-218, the contents of each of which are herein incorporated by reference in their entirety), Chothia (Chothia and Lesk, J. Mol. Biol. 1987, 196, 901, Chothia et al., Nature, 1989, 342, 877, and Al-Lazikani et al., J. Mol. Biol. 1997, 273(4): 927-948, the contents of each of which are herein incorporated by reference in their entirety), Lefranc (Lefranc et al., Immunome Res. 2005, 1:3) and Honegger (Honegger and Pluckthun, J. Mol. Biol. 2001, 309(3): 657-70, the contents of which are herein incorporated by reference in their entirety).

[0125] VH and VL domains have three CDRs each. VL CDRs are referred to herein as CDR-L1, CDR-L2 and CDR-L3, in order of occurrence when moving from N- to C-terminus along the variable domain polypeptide. VH CDRs are referred to herein as CDR-H1, CDR-H2 and CDR-H3, in order of occurrence when moving from N- to C-terminus along the variable domain polypeptide. Each of CDRs have favored canonical structures with the exception of the CDR-H3, which comprises amino acid sequences that may be highly variable in sequence and length between antibodies resulting in a variety of three-dimensional structures in antigen-binding domains (Nikoloudis, et al., Peer J. 2014, 2: e456). In some cases, CDR-H3s may be analyzed among a panel of related antibodies to assess antibody diversity. Various methods of determining CDR sequences are known in the art and may be applied to known antibody sequences (Strohl, W. R. Therapeutic Antibody Engineering. Woodhead Publishing, Philadelphia Pa. 2012. Ch. 3, p47-54, the contents of which are herein incorporated by reference in their entirety).

[0126] As used herein, the term “light chain” refers to a component of an antibody from any vertebrate species assigned to one of two clearly distinct types, called kappa and lambda based on amino acid sequences of constant domains. Depending on the amino acid sequence of the constant domain of their heavy chains, antibodies can be assigned to different classes. There are five major classes of intact antibodies: IgA, IgD, IgE, IgG, and IgM, and several of these may be further divided into subclasses (isotypes), e.g., IgG1, IgG2, IgG3, IgG4, IgA, and IgA2.

[0127] In some embodiments, the payload maybe a monoclonal antibody. As used herein, the term “monoclonal antibody” refers to an antibody obtained from a population of substantially homogeneous cells (or clones), i.e., the individual antibodies comprising the population are identical and/or bind the same epitope, except for possible variants that may arise during production of the monoclonal antibodies, such variants generally being present in minor amounts. In contrast to polyclonal antibody preparations that typically include different antibodies directed against different determinants (epitopes), each monoclonal antibody is directed against a single determinant on the antigen.

[0128] The modifier “monoclonal” indicates the character of the antibody as being obtained from a substantially homogeneous population of antibodies and is not to be construed as requiring production of the antibody by any particular method. The monoclonal antibodies herein include “chimeric” antibodies (immunoglobulins) in which a portion of the heavy and/or light chain is identical with or homologous to corresponding sequences in antibodies derived from a particular species or belonging to a particular antibody class or subclass, while the remainder of the chain(s) is identical with or homologous to corresponding sequences in antibodies derived from another species or belonging to another antibody class or subclass, as well as fragments of such antibodies.

[0129] In one embodiment, the payload of the present disclosure may be a humanized antibody. As used herein, the term “humanized antibody” refers to a chimeric antibody comprising a minimal portion from one or more non-human (e.g., murine) antibody source(s) with the remainder derived from one or more human immunoglobulin sources. For the most part, humanized antibodies are human immunoglobulins (recipient antibody) in which residues from the hypervariable region from an antibody of the recipient are replaced by residues from the hypervariable region from an antibody of a non-human species (donor antibody) such as mouse, rat, rabbit or nonhuman primate having the desired specificity, affinity, and/or capacity. In one embodiment, the antibody may be a humanized full-length antibody. As a non-limiting example, the antibody may have been humanized using the methods taught in US Patent Publication NO. US20130303399, the contents of which are herein incorporated by reference in its entirety.

[0130] In one embodiment, the antibody may comprise a modified Fc region. As a non-limiting example, the modified Fc region may be made by the methods or may be any of the regions described in US Patent Publication NO. US20150065690, the contents of which are herein incorporated by reference in its entirety.

[0131] As used herein, the term “antibody variant” refers to a modified antibody (in relation to a native or starting antibody) or a biomolecule resembling a native or starting antibody in structure and/or function (e.g., an antibody mimetic). Antibody variants may be altered in their amino acid sequence, composition or structure as compared to a native antibody. Antibody variants may include, but are not limited to, antibodies with altered isotypes (e.g., IgA, IgD, IgE, IgG1, IgG2, IgG3, IgG4, or IgM), humanized variants, optimized variants, multispecific antibody variants (e.g., bispecific variants), and antibody fragments.

[0132] In some embodiments, antibody fragments and variants may comprise antigen binding regions from intact antibodies. Examples of antibody fragments and variants may include, but are not limited to Fab, Fab′, F(ab′)2, and Fv fragments; diabodies; linear antibodies; single-chain antibody molecules such as single chain variable fragment (scFv); dimeric single-chain variable fragment (di-scFv), single domain antibody (sdAb) and multispecific antibodies formed from antibody fragments. Papain digestion of antibodies produces two identical antigen-binding fragments, called “Fab” fragments, each with a single antigen-binding site. Also produced is a residual “Fc” fragment, whose name reflects its ability to crystallize readily. Pepsin treatment yields an F(ab′)2 fragment that has two antigen-binding sites and is still capable of cross-linking antigen. Pharmaceutical compositions, biocircuits, biocircuit components, effector modules including their SREs or payloads of the present disclosure may comprise one or more of these fragments.

[0133] As used herein, the term “Fv” refers to an antibody fragment comprising the minimum fragment on an antibody needed to form a complete antigen-binding site. These regions consist of a dimer of one heavy chain and one light chain variable domain in tight, non-covalent association. Fv fragments can be generated by proteolytic cleavage but are largely unstable. Recombinant methods are known in the art for generating stable Fv fragments, typically through insertion of a flexible linker between the light chain variable domain and the heavy chain variable domain (to form a single chain Fv (scFv) or through the introduction of a disulfide bridge between heavy and light chain variable domains (Strohl, W. R. Therapeutic Antibody Engineering. Woodhead Publishing, Philadelphia Pa. 2012. Ch. 3, p 46-47, the contents of which are herein incorporated by reference in their entirety).

[0134] As used herein, the term “single chain Fv” or “scFv” refers to a fusion protein of VH and VL antibody domains, wherein these domains are linked together into a single polypeptide chain by a flexible peptide linker. In some embodiments, the Fv polypeptide linker enables the scFv to form the desired structure for antigen binding. In some embodiments, scFvs are utilized in conjunction with phage display, yeast display or other display methods where they may be expressed in association with a surface member (e.g. phage coat protein) and used in the identification of high affinity peptides for a given antigen.

[0135] Using molecular genetics, two scFvs can be engineered in tandem into a single polypeptide, separated by a linker domain, called a “tandem scFv” (tascFv). Construction of a tascFv with genes for two different scFvs yields a “bispecific single-chain variable fragments” (bis-scFvs). Only two tascFvs have been developed clinically by commercial firms; both are bispecific agents in active early phase development by Micromet for oncologic indications and are described as “Bispecific T-cell Engagers (BiTE).” Blinatumomab is an anti-CD19/anti-CD3 bispecific tascFv that potentiates T-cell responses to B-cell non-Hodgkin lymphoma in Phase 2. MT110 is an anti-EP-CAM/anti-CD3 bispecific tascFv that potentiates T-cell responses to solid tumors in Phase 1. Bispecific, tetravalent “TandAbs” are also being researched by Affimed (Nelson, A. L., MAbs., 2010, January-February; 2(1):77-83). maxibodies (bivalent scFv fused to the amino terminus of the Fc (CH2-CH3 domains) of IgG may also be included.

[0136] As used herein, the term “bispecific antibody” refers to an antibody capable of binding two different antigens. Such antibodies typically comprise regions from at least two different antibodies. Bispecific antibodies may include any of those described in Riethmuller, G. Cancer Immunity. 2012, 12:12-18, Marvin et al., 2005. Acta Pharmacologica Sinica. 2005, 26(6): 649-658 and Schaefer et al., PNAS. 2011, 108(27):11187-11192, the contents of each of which are herein incorporated by reference in their entirety. In some aspects, bispecific antibodies may be trifunctional antibodies (3funct) and BiTE (bi-specific T cell engager).

[0137] As used herein, the term “diabody” refers to a small antibody fragment with two antigen-binding sites. Diabodies are functional bispecific single-chain antibodies (bscAb). Diabodies comprise a heavy chain variable domain VH connected to a light chain variable domain VL in the same polypeptide chain. By using a linker that is too short to allow pairing between the two domains on the same chain, the domains are forced to pair with the complementary domains of another chain and create two antigen-binding sites. Diabodies are described more fully in, for example, EP 404,097; WO 93/11161; and Hollinger et al. (Hollinger, P. et al., “Diabodies”: Small bivalent and bispecific antibody fragments. PNAS, 1993. 90: 6444-6448); the contents of each of which are incorporated herein by reference in their entirety.

[0138] The term “intrabody” refers to a form of antibody that is not secreted from a cell in which it is produced, but instead targets one or more intracellular proteins. Intrabodies may be used to affect a multitude of cellular processes including, but not limited to intracellular trafficking, transcription, translation, metabolic processes, proliferative signaling and cell division. In some embodiments, methods of the present disclosure may include intrabody-based therapies. In some such embodiments, variable domain sequences and/or CDR sequences disclosed herein may be incorporated into one or more constructs for intrabody-based therapy.

[0139] In some embodiments, antibody variants may be antibody mimetics. As used herein, the term “antibody mimetic” refers to any molecule which mimics the function or effect of an antibody and which binds specifically and with high affinity to their molecular targets. In some embodiments, antibody mimetics may be monobodies, designed to incorporate the fibronectin type III domain (Fn3) as a protein scaffold (U.S. Pat. Nos. 6,673,901; 6,348,584). In some embodiments, antibody mimetics may be those known in the art including, but are not limited to affibody molecules, affilins, affitins, anticalins, avimers, Centyrins, DARPINS™, Fynomers and Kunitz and domain peptides. In other embodiments, antibody mimetics may include one or more non-peptide regions.

[0140] In some embodiments, antibody variants may be multispecific antibodies that bind more than one epitope. As used herein, the terms “multibody” or “multispecific antibody” refer to an antibody wherein two or more variable regions bind to different epitopes. The epitopes may be on the same or different targets. In one embodiment, the multispecific antibody may be generated and optimized by the methods described in International Patent Publication NO. WO2011109726 and US Patent Publication NO. US20150252119, the contents of which each of which are herein incorporated by reference in their entirety. These antibodies are able to bind to multiple antigens with high specificity and high affinity.

[0141] In certain embodiments, a multi-specific antibody is a “bispecific antibody” which recognizes two different epitopes on the same or different antigens. In one aspect, bispecific antibodies are capable of binding two different antigens. Such antibodies typically comprise antigen-binding regions from at least two different antibodies. For example, a bispecific monoclonal antibody (BsMAb, BsAb) is an artificial protein composed of fragments of two different monoclonal antibodies, thus allowing the BsAb to bind to two different types of antigen. Bispecific antibody frameworks may include any of those described in Riethmuller, G., 2012. Cancer Immunity, 2012, 12:12-18; Marvin et al., Acta Pharmacologica Sinica. 2005, 26(6):649-658; and Schaefer et al., PNAS. 2011, 108(27): 11187-11192, the contents of each of which are herein incorporated by reference in their entirety. New generations of BsMAb, called “trifunctional bispecific” antibodies, have been developed. These consist of two heavy and two light chains, one each from two different antibodies, where the two Fab regions (the arms) are directed against two antigens, and the Fc region (the foot) comprises the two heavy chains and forms the third binding site.

[0142] In certain embodiments, antibody variants may be antibodies comprising a single antigen-binding domain. These molecules are extremely small, with molecular weights approximately one-tenth of those observed for full-sized mAbs. Further antibodies may include “nobodies” derived from the antigen-binding variable heavy chain regions (VHHs) of heavy chain antibodies found in camels and llamas, which lack light chains (Nelson, A. L., MAbs. 2010. January-February; 2(1):77-83).

[0143] In some embodiments, the antibody may be “miniaturized”. Among the best examples of mAb miniaturization are the small modular immunopharmaceuticals (SMIPs) from Trubion Pharmaceuticals. These molecules, which can be monovalent or bivalent, are recombinant single-chain molecules containing one VL, one VH antigen-binding domain, and one or two constant “effector” domains, all connected by linker domains. Presumably, such a molecule might offer the advantages of increased tissue or tumor penetration claimed by fragments while retaining the immune effector functions conferred by constant domains. At least three “miniaturized” SMIPs have entered clinical development. TRU-015, an anti-CD20 SMIP developed in collaboration with Wyeth, is the most advanced project, having progressed to Phase 2 for rheumatoid arthritis (RA). Earlier attempts in systemic lupus erythematosus (SLE) and B cell lymphomas were ultimately discontinued. Trubion and Facet Biotechnology are collaborating in the development of TRU-016, an anti-CD37 SMIP, for the treatment of CLL and other lymphoid neoplasias, a project that has reached Phase 2. Wyeth has licensed the anti-CD20 SMIP SBI-087 for the treatment of autoimmune diseases, including RA, SLE and possibly multiple sclerosis, although these projects remain in the earliest stages of clinical testing. (Nelson, A. L., MAbs, 2010. January-February; 2(1):77-83).

[0144] One example of miniaturized antibodies is called “unibody” in which the hinge region has been removed from IgG4 molecules. While IgG4 molecules are unstable and can exchange light-heavy chain heterodimers with one another, deletion of the hinge region prevents heavy chain-heavy chain pairing entirely, leaving highly specific monovalent light/heavy heterodimers, while retaining the Fc region to ensure stability and half-life in vivo. This configuration may minimize the risk of immune activation or oncogenic growth, as IgG4 interacts poorly with FcRs and monovalent unibodies fail to promote intracellular signaling complex formation (see, e.g., Nelson, A. L., MAbs, 2010. January-February; 2(1):77-83).

[0145] In some embodiments, antibody variants may include single-domain antibodies (sdAbs, or nanobodies) which are antibody fragment consisting of a single monomeric variable antibody domain. Like a whole antibody, it is able to bind selectively to a specific antigen. In one aspect, a sdAb may be a “Camel Ig or “camelid VHH”. As used herein, the term “camel Ig” refers to the smallest known antigen-binding unit of a heavy chain antibody (Koch-Nolte, et al, FASEB J., 2007, 21: 3490-3498). A “heavy chain antibody” or a “camelid antibody” refers to an antibody that contains two VH domains and no light chains (Riechmann L. et al, J. Immunol. Methods, 1999, 231: 25-38; International patent publication NOs. WO1994/04678 and WO1994/025591; and U.S. Pat. No. 6,005,079). In another aspect, an sdAb may be a “immunoglobulin new antigen receptor” (IgNAR). As used herein, the term “immunoglobulin new antigen receptor” refers to class of antibodies from the shark immune repertoire that consist of homodimers of one variable new antigen receptor (VNAR) domain and five constant new antigen receptor (CNAR) domains. IgNARs represent some of the smallest known immunoglobulin-based protein scaffolds and are highly stable and possess efficient binding characteristics. The inherent stability can be attributed to both (i) the underlying Ig scaffold, which presents a considerable number of charged and hydrophilic surface exposed residues compared to the conventional antibody VH and VL domains found in murine antibodies; and (ii) stabilizing structural features in the complementary determining region (CDR) loops including inter-loop disulfide bridges, and patterns of intra-loop hydrogen bonds.

[0146] In some embodiments, antibody variants may include intrabodies. Intrabodies are a form of antibody that is not secreted from a cell in which it is produced, but instead targets one or more intracellular proteins. Intrabodies are expressed and function intracellularly and may be used to affect a multitude of cellular processes including, but not limited to intracellular trafficking, transcription, translation, metabolic processes, proliferative signaling and cell division. In some embodiments, methods described herein include intrabody-based therapies. In some such embodiments, variable domain sequences and/or CDR sequences disclosed herein are incorporated into one or more constructs for intrabody-based therapy. For example, intrabodies may target one or more glycated intracellular proteins or may modulate the interaction between one or more glycated intracellular proteins and an alternative protein.

[0147] The intracellular expression of intrabodies in different compartments of mammalian cells allows blocking or modulation of the function of endogenous molecules (Biocca, et al., EMBO J. 1990, 9: 101-108; Colby et al., Proc. Natl. Acad. Sci. U.S.A. 2004, 101: 17616-17621). Intrabodies can alter protein folding, protein-protein, protein-DNA, protein-RNA interactions and protein modification. They can induce a phenotypic knockout and work as neutralizing agents by direct binding to the target antigen, by diverting its intracellular trafficking or by inhibiting its association with binding partners. With high specificity and affinity to target antigens, intrabodies have advantages to block certain binding interactions of a particular target molecule, while sparing others.

[0148] Sequences from donor antibodies may be used to develop intrabodies. Intrabodies are often recombinantly expressed as single domain fragments such as isolated VH and VL domains or as a single chain variable fragment (scFv) antibody within the cell. For example, intrabodies are often expressed as a single polypeptide to form a single chain antibody comprising the variable domains of the heavy and light chains joined by a flexible linker polypeptide. Intrabodies typically lack disulfide bonds and are capable of modulating the expression or activity of target genes through their specific binding activity. Single chain intrabodies are often expressed from a recombinant nucleic acid molecule and engineered to be retained intracellularly (e.g., retained in the cytoplasm, endoplasmic reticulum, or periplasm). Intrabodies may be produced using methods known in the art, such as those disclosed and reviewed in: (Marasco et al., PNAS, 1993, 90: 7889-7893; Chen et al., Hum. Gene Ther. 1994, 5:595-601; Chen et al., 1994, PNAS, 91: 5932-5936; Maciejewski et al., 1995, Nature Med., 1: 667-673; Marasco, 1995, Immunotech, 1: 1-19; Mhashilkar, et al., 1995, EMBO J. 14: 1542-51; Chen et al., 1996, Hum. Gene Therap., 7: 1515-1525; Marasco, Gene Ther. 4:11-15, 1997; Rondon and Marasco, 1997, Annu. Rev. Microbiol. 51:257-283; Cohen, et al., 1998, Oncogene 17:2445-56; Proba et al., 1998, J. Mol. Biol. 275:245-253; Cohen et al., 1998, Oncogene 17:2445-2456; Hassanzadeh, et al., 1998, FEBS Lett. 437:81-6; Richardson et al., 1998, Gene Ther. 5:635-44; Ohage and Steipe, 1999, J. Mol. Biol. 291:1119-1128; Ohage et al., 1999, J. Mol. Biol. 291:1129-1134; Wirtz and Steipe, 1999, Protein Sci. 8:2245-2250; Zhu et al., 1999, J. Immunol. Methods 231:207-222; Arafat et al., 2000, Cancer Gene Ther. 7:1250-6; der Maur et al., 2002, J. Biol. Chem. 277:45075-85; Mhashilkar et al., 2002, Gene Ther. 9:307-19; and Wheeler et al., 2003, FASEB J. 17: 1733-5; and references cited therein).

[0149] In certain embodiments, antibody variants may include biosynthetic antibodies as described in U.S. Pat. No. 5,091,513, the contents of which are herein incorporated by reference in their entirety. Such antibody may include one or more sequences of amino acids constituting a region which behaves as a biosynthetic antibody binding site (BABS). The sites comprise 1) non-covalently associated or disulfide bonded synthetic VH and VL dimers, 2) VH-VL or VL-VH single chains wherein the VH and VL are attached by a polypeptide linker, or 3) individuals VH or VL domains. The binding domains comprise linked CDR and FR regions, which may be derived from separate immunoglobulins. The biosynthetic antibodies may also include other polypeptide sequences which function, e.g., as an enzyme, toxin, binding site, or site of attachment to an immobilization media or radioactive atom. Methods are disclosed for producing the biosynthetic antibodies, for designing BABS having any specificity that can be elicited by in vivo generation of antibody, and for producing analogs thereof.

[0150] In some embodiments, antibody variants may include antibodies with antibody acceptor frameworks taught in U.S. Pat. No. 8,399,625. Such antibody acceptor frameworks may be particularly well suited accepting CDRs from an antibody of interest.

[0151] In one embodiment, the antibody may be a conditionally active biologic protein. An antibody may be used to generate a conditionally active biologic protein which are reversibly or irreversibly inactivated at the wild type normal physiological conditions as well as to such conditionally active biologic proteins and uses of such conditional active biologic proteins are provided. Such methods and conditionally active proteins are taught in, for example, International Publication Nos. WO2015175375 and WO2016036916 and US Patent Publication No. US20140378660, the contents of each of which are incorporated herein by reference in their entirety.

[0152] The preparation of antibodies, whether monoclonal or polyclonal, is known in the art. Techniques for the production of antibodies are well known in the art and described, e.g. in Harlow and Lane “Antibodies, A Laboratory Manual”, Cold Spring Harbor Laboratory Press, 1988; Harlow and Lane “Using Antibodies: A Laboratory Manual” Cold Spring Harbor Laboratory Press, 1999 and “Therapeutic Antibody Engineering: Current and Future Advances Driving the Strongest Growth Area in the Pharmaceutical Industry” Woodhead Publishing, 2012.

[0153] The antibodies and fragments and variants thereof as described herein can be produced using recombinant polynucleotides. In one embodiment, the polynucleotides have a modular design to encode at least one of the antibodies, fragments or variants thereof. As a non-limiting example, the polynucleotide construct may encode any of the following designs: (1) the heavy chain of an antibody, (2) the light chain of an antibody, (3) the heavy and light chain of the antibody, (4) the heavy chain and light chain separated by a linker, (5) the VH1, CH1, CH2, CH3 domains, a linker and the light chain or (6) the VH1, CH1, CH2, CH3 domains, VL region, and the light chain. Any of these designs may also comprise optional linkers between any domain and region. The polynucleotides of the present disclosure may be engineered to produce any standard class of immunoglobulins using an antibody described herein or any of its component parts as a starting molecule.

[0154] In some embodiments, antibody payloads of the present disclosure may be therapeutic antibodies. As non-limiting examples, antibodies and fragments and variants thereof may be specific to tumor associated antigens, or tumor specific antigens, or pathogen antigens. In some aspects, antibodies may be blocking antibodies (also referred to as antagonistic antibodies), for example, blocking antibodies against PD-1, PD-L1, PD-L2, CTLA-4 and other inhibitory molecules. In other aspects, antibodies may be agonist antibodies such as agonistic antibodies specific to stimulatory molecules, e.g., 4-1BB (CD137), OX40 (CD134), CD40, GITR and CD27.

[0155] Other exemplary therapeutic antibodies may include, but are not limited to, Abagovomab, Abcxmab, Abituzumab, Abrilumab, Actoxumab, Adalimumab, Adecatumumab, Afasevikumab, Afelimomab, Afutuzumab, Alacizumab, Alemtuzumab, Alirocumab, Altumomab, Amatuximab, Anetumab, Anifrolumab, Apolizumab, Arcitumomab, Ascrinvacumab, Aselizumab, Atezolizumab, Atinumab, Atlizumab, Atorolimumab, Avelumab, Bapineuzumab, Basiliximab, Bavituximab, Bectumomab, Begelomab, Belimumab, Benralizumab, Bertilimumab, Besilesomab, Bevacizumab, Bezlotoxumab, Biciromab, Bimagrumab, Bimekizumab, Bivatuzumab, Bleselumab, Blinatumomab, Blinatumomab, Blosozumab, Bococizumab, Brentuximab, Briaknumab, Brodalumab, Brolucizumab, Brontictuzumab, Cabiralizumab, Canakinumab, Cantuzumab, Caplacizumab, Capromab, Carlumab, Carotuximab, Catumaxomab, cBR96-doxorubicin immunoconjugate, Cedelizumab, Cergutuzumab, Certolizumab pegol, Cetuximab, Citatuzumab, Cixutumumab, Clazakizumab, Clenoliximab, Clivatuzumab, Codrituzumab, Coltuximab, Contatumumab, Concizumab, Crenezumab, Crotedumab, CR6261, Dacetumab, Daclizumab, Dalotuzumab, Dapirolizumab pegol, Daratumumab, Dectrekumab, Demcizumab, Denintuzumab, Denosumab, Derlotuximab biotin, Detumomab, Dinutuximab, Diridavumab, Domagrozumab, Dorlimomab aritox, Drozitumab, Duligotumab, Dupilumab, Durvalumab, Dusigitumab, Ecromeximab, Eculizumab, Edobacomab, Edrecolomab, Efalizumab, Efungumab, Eldelumab, Elgemtumab, Elotuzumab, Elsilimomab, Emactuzumab, Emibetuzumab, Emicizumab, Enavatuzumab, Enfortumab vedotin, Enlimomab pegol, Enoblituzumab, Enokizumab, Enoticumab, Ensituximab, Epitumomab cituxetan, Epratuzumab, Erlizumab, Ertumaxomab, Etaracizumab, Etrolizumab, Evinacumab, Evolocumab, Exbivirumab, Fanolesomab, Faralimomab, Farletuzumab, Fasinumab, FBTA05, Felvizumab, Fezakinumab, Fibatuzumab, Ficlatuzumab, Figitumumab, Firivumab, Flanvotumab, Fletikumab, Fontolizumab, Foralumab, Foravirumab, Fresolimumab, Fulranumab, Futuximab, Galcanezumab, Galiximab, Ganitumab, Gantenerumab, Gavilimomab, Gemtuzumab ozogamicin, Gevokizumab, Girentuximab, Glembatumumab vedotin, Golimumab, Gomiliximab, Guselkumab, Ibalizumab, Ibritumomab tituxetan, icrucumab, Idarucizumab, Igovomab, IMAB362, Imalumab, Imciromab, Imgatuzumab, Inclacumab, Indatuximab, Indusatumab, Inebilizumab, Infliximab, Intetumumab, Inolimomab, Inotuzumab, Ipilimumab, Iratumumab, Isatuximab, Itolizumab, Ixekizumab, Keliximab, Labetuzumab, Lambrolizumab, Lampalizumab, Lanadelumab, Landogrozumab, Laprituximab, Lebrikizumab, Lemalesomab, Lendalizumab, Lenzilumab, Lerdelimumab, Lexatumumab, Libivirumab, Lifastuzumab, Ligelizumab, Lilotomab, Lintuzumab, Lirilumab, Lodelcizumab, Lokivetmab, Lorvotuzumab, Lucatumumab, Lulizumab pegol, Lumiliximab, Lumretuzumab, Mapatumumab, Margetuximab, Maslimomab, Mavrilimumab, Matuzumab, Mepolizumab, Metelimumab, Milatuzumab, Minretumomab, Mirvetuximab, Mitumomab, Mogamulizumab, Monalizumab, Morolimumab, Motavizumab, Moxetumomab pasudotox, Muromonab-CD3, nacolomab tafenatox, Namilumab, naptumomab, naratuximab, Narnatumab, Natalizumab, Navicixizumab, Navivumab, Nebacumab, Necitumumab, Nemolizumab, Nerelimomab, Nesvacumab, Nimotuzumab, Nivolumab, Nofetumomab, Obiltoxaximab, Obinutuzumab, Ocaratuzumab, Ocrelizumab, Odulimomab, Ofatumumab, Olaratumab, Olaratumab, Olokizumab, Omalizumab, Onartuzumab, Ontuxizumab, Opicinumab, Oportuzumab monatox, Oregovomab, Orticumab, Otelixizumab, Otlertuzumab, Oxelumab, Ozanezumab, Ozoralizumab, Pagibaximab, Palivizumab, Pamrevlumab, Panitumumab, Pankomab, Panobacumab, Parsatuzumab, Pascolizumab, Pasotuxizumab, Pateclizumab, Patritumab, Pembrolizumab, Pemtumomab, Perakizumab, Pertuzumab, Pexelizumab, Pidilizumab, Pinatuzumab, Pintumomab, Placulumab, Plozalizumab, Pogalizumab, Polatuzumab, Ponezumab, Prezalizumab, Priliximab, Pritoxaximab, Pritumumab, PRO 140, Quilizumab, Racotumomab, Radretumab, Rafivirumab, Ralpancizumab, Ramucirumab, Ranibizumab, Raxibacumab, Refanezumab, Regavirumab, Reslizumab, Rilotumumab, Rinucumab, Risankizumab, Rituximab, Rivabazumab pegol, Robatumumab, Roledumab, Romosozumab, Rontalizumab, Rovalpituzumab, Rovelizumab, Ruplizumab, Sacituzumab, Samalizumab, Sapelizumab, Sarilumab, Satumomab pendetide, Secukinumab, Seribantumab, Setoxaximab, Sevirumab, Sibrotuzumab, SGN-CD19A, SGN-CD33A, Sifalimumab, Siltuximab, Simtuzumab, Siplizumab, Sirukumab, Sofituzumab vedotin, Solanezumab, Solitomab, Sonepcizumab, Sontuzumab, Stamulumab, Sulesomab, Suvizumab, tabalumab, Tacatuzumab, Tadocizumab, Talizumab, Tamtuvetmab, Tanezumab, Taplitumomab, Tarextumab, Tefibazumab, Telimomab aritox, Tenatumomab, Teneliximab, Teplizumab, Teprotumumab, Tesidolumab, Tetulomab, Tezepelumab, TGN1412, Ticilimumab, Tildrakizumab, Tigatuzumab, Timolumab, Tisotumab vedotin, TNX-650, Tocilizumab, Toralizumab, Tosatoxumab, Tositumomab, Tovetumab, Tralokinumab, Trastuzumab, TRBS07, Tregalizumab, Tremelimumab, Trevogrumab, Tucotuzumab, Tuvirumab, Ublituximab, Ulcocuplumab, Urelumab, Urtoxazumab, Ustekinumab, Vadastuximab talirine, Vandortuzumab vedotin, Vantictumab, Vanucizumab, Vapaliximab, Varlilumab, Vatelizumab, Vedolizumab, Veltuzumab, Vepalimomab, Vesencumab, Visilizumab, Vobarilizumab, Volociximab, Vorsetuzumab, Votumumab, Xentuzumab, Zalutumumab, Zanolimumab, Zatuximab, Ziralimumab and Zolimomab aritox.

Bicistronic and/or Pseudo-Bicistronic Antibody Payloads

[0156] According to the present disclosure, a bicistronic payload is a polynucleotide encoding a two-protein chain antibody on a single polynucleotide strand. A pseudo-bicistronic payload is a polynucleotide encoding a single chain antibody discontinuously on a single polynucleotide strand. For bicistronic payloads, the encoded two strands or two portions/regions and/or domains (as is the case with pseudo-bicistronic) are separated by at least one nucleotide not encoding the strands or domains. More often the separation comprises a cleavage signal or site or a non-coding region of nucleotides. Such cleavage sites include, for example, furin cleavage sites encoded as an “RKR” site, or a modified furin cleavage site in the resultant polypeptide or any of those taught herein.

[0157] According to the present disclosure, a single domain payload comprises one or two polynucleotides encoding a single monomeric variable antibody domain. Typically, single domain antibodies comprise one variable domain (VH) of a heavy-chain antibody.

[0158] According to the present disclosure, a single chain Fv payloads is a polynucleotide encoding at least two coding regions and a linker region. The scFv payload may encode a fusion protein of the variable regions of the heavy (VH) and light chains (VL) of immunoglobulins, connected with a short linker peptide of ten to about 25 amino acids. The linker is usually rich in glycine for flexibility, as well as serine or threonine for solubility, and can either connect the N-terminus of the VH with the C-terminus of the VL, or vice versa. Other linkers include those known in the art and disclosed herein.

[0159] According to the present disclosure, a bispecific payload is a polynucleotide encoding portions or regions of two different antibodies. Bispecific payloads encode polypeptides which may bind two different antigens. Polynucleotides of the present disclosure may also encode trispecific antibodies having an affinity for three antigens.

### 3. Therapeutic Agents

[0160] In some embodiments, payloads of the present disclosure may be a therapeutic agent, such as a cancer therapeutic agent, an immunotherapeutic agent, an anti-pathogen agent or a gene therapy agent. In some aspects, the immunotherapeutic agent may be a TCR receptor, a chimeric antigen receptor (CAR), a chimeric switch receptor, an antagonist of a co-inhibitory molecule, an agonist of a co-stimulatory molecule, a cytokine, a cytokine receptor, a chemokine, a chemokine receptor, a metabolic factor, a homing receptor and a safety switch.

[0161] As used herein, the term “chimeric antigen receptor (CAR)” refers to a synthetic receptor that mimics TCR on the surface of T cells. In general, a CAR is composed of an extracellular targeting domain, a transmembrane domain/region and an intracellular signaling/activation domain. Cells such as T cells engineered to express a CAR can be redirected to attack target cells that express a molecule which can be recognized by the targeting moiety of the CAR. In a standard CAR receptor, the components: the extracellular targeting domain, transmembrane domain and intracellular signaling/activation domain, are linearly constructed as a single fusion protein. The extracellular region comprises a targeting domain/moiety (e.g., a scFv) that recognizes a specific tumor antigen or other tumor cell-surface molecules. The intracellular region may contain a signaling domain of TCR complex (e.g., the signal region of CD3ζ), and/or one or more costimulatory signaling domains, such as those from CD28, 4-1BB (CD137) and OX-40 (CD134). For example, a “first-generation CAR” only has the CD3ζ signaling domain, whereas in an effort to augment T-cell persistence and proliferation, costimulatory intracellular domains are added, giving rise to second generation CARs having a CD3ζ signal domain plus one costimulatory signaling domain, and third generation CARs having CD3ζ signal domain plus two or more costimulatory signaling domains. A CAR, when expressed by a T cell, endows the T cell with antigen specificity determined by the extracellular targeting moiety of the CAR. Recently, it is also desirable to add one or more elements such as homing and suicide genes to develop a more competent and safer architecture of CAR, so called the fourth-generation CAR.

[0162] A CAR may be capable of binding to a tumor specific antigen selected from 5T4, 707-AP, A33, AFP (α-fetoprotein), AKAP-4 (A kinase anchor protein 4), ALK, α5β1-integrin, androgen receptor, annexin II, alpha-actinin-4, ART-4, B1, B7H3, B7H4, BAGE (B melanoma antigen), BCMA, BCR-ABL fusion protein, beta-catenin, BKT-antigen, BTAA, CA-I (carbonic anhydrase I), CA50 (cancer antigen 50), CA125, CA15-3, CA195, CA242, cairetinin, CAIX (carbonic anhydrase), CAMEL (cytotoxic T-lymphocyte recognized antigen on melanoma), CAM43, CAP-1, Caspase-8/m, CD4, CD5, CD7, CD19, CD20, CD22, CD23, CD25, CD27/m, CD28, CD30, CD33, CD34, CD36, CD38, CD40/CD154, CD41, CD44v6, CD44v7/8, CD45, CD49f, CD56, CD68\KP1, CD74, CD79a/CD79b, CD103, CD123, CD133, CD138, CD171, cdc27/m, CDK4 (cyclin dependent kinase 4), CDKN2A, CDS, CEA (carcinoembryonic antigen), CEACAM5, CEACAM6, chromogranin, c-Met, c-Myc, coa-1, CSAp, CT7, CT10, cyclophilin B, cyclin B1, cytoplasmic tyrosine kinases, cytokeratin, DAM-10, DAM-6, dek-can fusion protein, desmin, DEPDC1 (DEP domain containing 1), E2A-PRL, EBNA, EGF-R (epidermal growth factor receptor), EGP-1 (epithelial glycoprotein-1) (TROP-2), EGP-2, EGP-40, EGFR (epidermal growth factor receptor), EGFRvIII, EF-2, ELF2M, EMMPRIN, EpCAM (epithelial cell adhesion molecule), EphA2, Epstein Barr virus antigens, Erb (ErbB1; ErbB3; ErbB4), ETA (epithelial tumor antigen), ETV6-AML1 fusion protein, FAP (fibroblast activation protein), FBP (folate-binding protein), FGF-5, folate receptor α, FOS related antigen 1, fucosyl GM1, G250, GAGE (GAGE-1; GAGE-2), galactin, GD2 (ganglioside), GD3, GFAP (glial fibrillary acidic protein), GM2 (oncofetal antigen-immunogenic-1; OFA-I-1), GnT-V, Gp100, H4-RET, HAGE (helicase antigen), HER-2/neu, HIFs (hypoxia inducible factors), HIF-1α, HIF-2α, HLA-A2, HLA-A*0201-R170I, HLA-A11, HMWMAA, Hom/Mel-40, HSP70-2M (Heat shock protein 70), HST-2, HTgp-175, hTERT (or hTRT), human papillomavirus-E6/human papillomavirus-E7 and E6, iCE (immune-capture EIA), IGF-1R, IGH-IGK, IL2R, IL5, ILK (integrin-linked kinase), IMP3 (insulin-like growth factor II mRNA-binding protein 3), IRF4 (interferon regulatory factor 4), KDR (kinase insert domain receptor), KIAA0205, KRAB-zinc finger protein (KID)-3; KID31, KSA (17-1A), K-ras, LAGE, LCK, LDLR/FUT (LDLR-fucosyltransferaseAS fusion protein), LeY (Lewis Y), MAD-CT-1, MAGE (tyrosinase, melanoma-associated antigen) (MAGE-1; MAGE-3), melan-A tumor antigen (MART), MART-2/Ski, MC1R (melanocortin 1 receptor), MDM2, mesothelin, MPHOSPH1, MSA (muscle-specific actin), mTOR (mammalian targets of rapamycin), MUC-1, MUC-2, MUM-1 (melanoma associated antigen (mutated) 1), MUM-2, MUM-3, Myosin/m, MYL-RAR, NA88-A, N-acetylglucosaminyltransferase, neo-PAP, NF-KB (nuclear factor-kappa B), neurofilament, NSE (neuron-specific enolase), Notch receptors, NuMa, N-Ras, NY-BR-1, NY-CO-1, NY-ESO-1, Oncostatin M, OS-9, OY-TES1, p53 mutants, p190 minor bcr-abl, p15(58), p185erbB2, p180erbB-3, PAGE (prostate associated gene), PAP (prostatic acid phosphatase), PAX3, PAX5, PDGFR (platelet derived growth factor receptor), cytochrome P450 involved in piperidine and pyrrolidine utilization (PIPA), Pml-RAR alpha fusion protein, PR-3 (proteinase 3), PSA (prostate specific antigen), PSM, PSMA (Prostate stem cell antigen), PRAME (preferentially expressed antigen of melanoma), PTPRK, RAGE (renal tumor antigen), Raf (A-Raf, B-Raf and C-Raf), Ras, receptor tyrosine kinases, RCAS1, RGSS, ROR1 (receptor tyrosine kinase-like orphan receptor 1), RU1, RU2, SAGE, SART-1, SART-3, SCP-1, SDCCAG16, SP-17 (sperm protein 17), src-family, SSX (synovial sarcoma X breakpoint)-1, SSX-2 (HOM-MEL-40), SSX-3, SSX-4, SSX-5, STAT-3, STAT-5, STAT-6, STEAD, STn, survivin, syk-ZAP70, TA-90 (Mac-2 binding protein\cyclophilin C-associated protein), TAAL6, TACSTD1 (tumor associated calcium signal transducer 1), TACSTD2, TAG-72-4, TAGE, TARP (T cell receptor gamma alternate reading frame protein), TEL/AML1 fusion protein, TEM1, TEM8 (endosialin or CD248), TGFβ, TIE2, TLP, TMPRSS2 ETS fusion gene, TNF-receptor (TNF-α receptor, TNF-β receptor; or TNF-γ receptor), transferrin receptor, TPS, TRP-1 (tyrosine related protein 1), TRP-2, TRP-2/INT2, TSP-180, VEGF receptor, WNT, WT-1 (Wilm's tumor antigen) and XAGE.

[0163] Exemplary CAR constructs may include a CAR targeting mesothelin (U.S. Pat. Nos. 9,272,002 and 9,359,447); EGFRvIII specific CARs in U.S. Pat. No. 9,266,960; anti-TAG CARs in U.S. Pat. No. 9,233,125; CD19 CARs in US Patent Publication NO. 2016/014533; CD19 CAR having the amino acid sequence of SEQ ID NO. 24 of U.S. Pat. No. 9,328,156; CD19 CARs in U.S. Pat. Nos. 8,911,993, 8,975,071, 9,101,584, 9,102,760, and 9,102,761; BCMA (CD269) specific CARs disclosed in International Patent Publication NOs. WO2016/014565 and WO2016/014789; CLL-1 (C-type lectin-like molecule 1) CARs comprising the amino acid sequences of SEQ ID NOs. 99, 96, 100, 101, 102, 91, 92, 93, 94, 95, 97, 98, 103, and 197 disclosed in International Patent Publication NO. WO2016/014535; CD33 specific CARs comprising the amino acid sequences of SEQ ID NOs. 48-56 in International Patent Publication NO. WO2016/014576; CD33 specific CARs comprising the amino acid sequences of SEQ ID NOs. 19-22, 27-30 and 35-38 in International Patent Publication NO. WO2015/150526; CD37 specific CARs encoded by the nucleic acids of SEQ ID NOs. 1-5 in US patent publication NO. US2015/0329640; GPC3 CAR (International patent publication NO. WO2016/036973), GFRalpha 4 CARs having the amino acid sequences of SEQ ID NOs. 85, 86, 90, 92, 94, 96, 98, 100, 102, and 104 in International Patent Publication NO. WO2016/025880; CD123 CARs comprising the amino acid sequences of SEQ ID NOs. 98, 99, 100 and 101 in International Patent Publication NOs. WO2016/028896; CD123 specific multi-chain CARs in International Patent Publication NO. WO2015/193406; ROR-1 specific CARs comprising the amino acid sequences of SEQ ID NOs. 93, 95 and 117 in International Patent Publication NO. WO2016/016344; ROR-1 specific multi-chain CARs in International patent publication NO. WO2016/016343; trophoblast glycoprotein (5T4, TPBG) specific CARs comprising the amino acid sequences of SEQ ID NOs. 21, 27, 33, 39, 23, 29, 34, 41, 19, 25, 31, 37, 20, 26, 32, 38, 22, 28, 34, 40, 24, 30, 36 and 42 in International Patent Publication NO. WO2016/034666; EGFRvIII specific CARs comprising the amino acid sequences of SEQ ID NOs. 15, 17, 24, 25, 26 and 27 in International Patent Publication NO. WO2016016341; a TEM 8 CAR comprising the amino acid sequence of SEQ ID NO. 1 in International Patent Publication NO. WO2014164544, a TEMl CAR comprising the amino acid sequence of SEQ 1D NO. 2 in International Patent Publication NO. WO2014164544; GPC-3 CAR having the amino acid sequences of SEQ ID NOs. 3 and 26 in international Patent Publication NO. WO2016/049459; a chondroitin sulfate proteoglycan-4 (CSPG4) CAR in International Patent Publication NO. WO2015/080981; Kappa/lambda CARs in International Patent Publication NO. WO2015/164739; the contents of each of which are incorporated herein by reference in their entirety.

[0164] In some embodiments, the chimeric antigen receptors described herein may include CD3 zeta domains altered to tune CAR activity. The CD3 zeta domains may include one or more mutations in the immunoreceptor tyrosine-based activation motifs (ITAMs). In one aspect, the tyrosine residues within the ITAMs may be mutated resulting in reduced phosphorylation and limited downstream signaling. In some embodiments, one or more of the ITAMs may be deleted from the CD3 zeta domain. In one aspect, the CD3 zeta may include one ITAM. Any of the CARs and CD3 zeta domains described by Feucht et al. 2019 may be used herein (Calibration of CAR activation potential directs alternative T cell fates and therapeutic potency. Nature Medicine 25, 82-88 (2019); the contents of which are herein incorporated by reference in their entirety).

[0165] In some embodiments, the CAR constructs may include CAIX (carboxy-anhydrase-IX (CAIX) specific CAR (Lamers et al., Biochem Soc Trans, 2016, 44(3): 951-959), HIV-1 specific CAR (Ali et al., J Virol., 2016, May 25, pii: JVI.00805-16), CD20 specific CAR (Rufener et al., Cancer Immunol. Res., 2016, 4(6): 509-519), a CD20/CD19 bispecific CAR (Zah et al., Cancer Immunol Res., 2016, 4(6): 498-508), and EGFR specific CARs; the contents of each of which are incorporated herein by reference in their entirety.

[0166] In some embodiments, effector modules that include ER derived SREs and CD19 CAR payloads may have a sequence described in International Patent Publication WO2017181119, herein incorporated by reference in its entirety, such as but not limited to SEQ ID NO. 897; 900; 902; 905; 907; 910; 912; 915; 917; 920; 922; 925; 927; 930; 932; 935; 937; 940; 942; 945; 947; 950; 952 of WO2017181119 or variants thereof.

[0167] In some embodiments, the CD19 CAR tertiary structure may be modified to improve safety profile of CD19 CART cell therapy using tertiary-structure-prediction program (Phrye2) (Kelley et al. 2009. Nat. Protoc. 4, 363-371. CAR with improved safety profile may include but are not limited to those with reduced ability to produce cytokines. In some embodiments, the CARs with improved safety profile may include the CD19-BBz CAR variant contains an 86-amino-acid fragment from human CD8a, comprising a longer extracellular-domain fragment (55 amino acids versus 45 amino acids in the CD19-BBz (prototype) and a longer intracellular sequence (7 amino acids versus 3 amino acids in CD19-BBz (prototype/Kymriahl™) as described by Ying et al. 2019 Nat Med. doi: 10.1038/s41591-019-0421-7 (the contents of which are herein incorporated by reference in their entirety). In another aspect, the payloads of the present disclosure may be the CD19-BBz(86) variant CAR co-expressed with truncated, nonfunctional epidermal growth factor receptor (tEGFR) as described by Ying et al. 2019.

[0168] In one embodiment, the payload is a CD19 specific CAR operably linked to human ER DD. Table 4 provides CD19 CAR components. In some embodiments, the payloads may be CAR expressed in tandem with IL12. Table 5 provides the CD19-IL12 CAR constructs, Table 6 provides the CD19 CAR constructs. In Table 5 and Table 6, * indicates translation of the stop codon.

TABLE 4
CD19 CAR and Tandem Construct Components

| | | AA | NA |
|---|---|---|---|
| | | SEQ | SEQ |
| | | ID | ID |
| Description | AA sequence | NO. | NO. |
| CD8α leader | MALPVTALLLPLALLLHAARP | 99 | 100; |
| | | | 367 |
| CD8α leader 2 | ALPVTALLLPLALLLHAARP | 408 | 409 |
| 1L12B (p40) signal | MCHQQLVISWFSLVFLASPLVA | 101 | 102 |
| sequence | | | |
| CD19 scFv | DIQMTQTTSSLSASLGDRVTISCRASQDISKYLNWYQQ | 103 | 104 |
| | KPDGTVKLLIYHTSRLHSGVPSRFSGSGSGTDYSLTISN | | |
| | LEQEDIATYFCQQGNTLPYTFGGGTKLEITGGGGSGGG | | |
| | GSGGGGSEVKLQESGPGLVAPSQSLSVTCTVSGVSLPD | | |
| | YGVSWIRQPPRKGLEWLGVIWGSETTYYNSALKSRLTI | | |
| | IKDNSKSQVFLKMNSLQTDDTAIYYCAKHYYYGGSYA | | |
| | MDYWGQGTSVTVSS | | |
| CD19 scFv2 | EIVMTQSPATLSLSPGERATLSCRASQDISKYLNWYQQ | 368 | 369 |
| | KPGQAPRLLIYHTSRLHSGIPARFSGSGSGTDYTLTISSL | | |
| | QPEDFAVYFCQQGNTLPYTFGQGTKLEIKGGGGSGGG | | |
| | GSGGGGSQVQLQESGPGLVKPSETLSLTCTVSGVSLPD | | |
| | YGVSWIRQPPGKGLEWIGVIWGSETTYYSSSLKSRVTIS | | |
| | KDNSKNQVSLKLSSVTAADTAVYYCAKHYYYGGSYA | | |
| | MDYWGQGTLVTVSS | | |
| CD8 Hinge and | TTTPAPRPPTPAPTIASQPLSLRPEACRPAAGGAVHTRG | 105 | 106; |
| TM | LDFACDIYIWAPLAGTCGVLLLSLVITLYC | | 370 |
| 4-1BB intracellular | KRGRKKLLYIFKQPFMRPVQTTQEEDGCSCRFPEEEEG | 107 | 108; |
| signaling domain | GCEL | | 371 |
| CD3 zeta signaling | RVKFSRSADAPAYKQGQNQLYNELNLGRREEYDVLD | 109 | 110; |
| domain | KRRGRDPEMGGKPRRKNPQEGLYNELQKDKMAEAYS | | 372 |
| | EIGMKGERRRGKGHDGLYQGLSTATKDTYDALHMQA | | |
| | LPPR | | |
| IL12B (p40) | IWELKKDVYVVELDWYPDAPGEMVVLTCDTPEEDGIT | 111 | 112 |
| (23-328 of WT) | WTLDQSSEVLGSGKTLTIQVKEFGDAGQYTCHKGGEV | | |
| | LSHSLLLLHKKEDGIWSTDILKDQKEPKNKTFLRCEAK | | |
| | NYSGRFTCWWLTTISTDLTFSVKSSRGSSDPQGVTCGA | | |
| | ATLSAERVRGDNKEYEYSVECQEDSACPAAEESLPIEV | | |
| | MVDAVHKLKYENYTSSFFIRDIIKPDPPKNLQLKPLKNS | | |
| | RQVEVSWEYPDTWSTPHSYFSLTFCVQVQGKSKREKK | | |
| | DRVFTDKTSATVICRKNASISVRAQDRYYSSSWSEWAS | | |
| | VPCS | | |
| IL12A (p35) | RNLPVATPDPGMFPCLHHSQNLLRAVSNMLQKARQTL | 113 | 114-115 |
| (57-253 of WT) | EFYPCTSEEIDHEDITKDKTSTVEACLPLELTKNESCLN | | |
| | SRETSFITNGSCLASRKTSFMNIALCLSSIYEDLKMYQV | | |
| | EFKTMNAKLLMDPKRQIFLDQNMLAVIDELMQALNFN | | |
| | SETVPQKSSLEEPDFYKTKIKLCILLHAFRIRAVTIDRV | | |
| | MSYLNAS | | |
| Furin cleavage | RTKR | 116 | 117 |
| site 1 | | | |
| Modified Furin | ESRRVRRNKRSK | 118 | 119 |
| P2A cleavage site | ATNFSLLKQAGDVEENPGP | 120 | 121 |
| Spacer | — | — | 122 |
| Spacer | — | — | 123 |
| IRES | — | — | 124 |
| Linker ((G4S)3 | GGGGSGGGGSGGGGS | 125 | 126 |
| Flexible G/S rich | GS | | |
| linker | | | |

TABLE 5
CD19-IL12 Tandem CAR Constructs

| | | | AA | NA |
|---|---|---|---|---|
| | | | SEQ | SEQ |
| | | | ID | ID |
| Construct ID | Description | AA sequence | NO. | NO. |
| OT-001640 (Full | Full | — | — | 127 |
| Construct: CD8α | Construct | | | |
| leader sequence; | Encoded | MALPVTALLLPLALLLHAARPDIQMTQTTSSLSASL | 128 | 129 |
| CD19 scFv; | Protein 1 | GDRVTISCRASQDISKYLNWYQQKPDGTVKLLIYH | | |
| CD8α Hinge-TM; | | TSRLHSGVPSRFSGSGSGTDYSLTISNLEQEDIATYF | | |
| 4-1BB signaling | | CQQGNTLPYTFGGGTKLEITGGGGSGGGGSGGGGS | | |
| domain; CD3 zeta | | EVKLQESGPGLVAPSQSLSVTCTVSGVSLPDYGVS | | |
| signaling domain; | | WIRQPPRKGLEWLGVIWGSETTYYNSALKSRLTIIK | | |
| stop; Spacer; | | DNSKSQVFLKMNSLQTDDTAIYYCAKHYYYGGSY | | |
| IRES; Spacer; | | AMDYWGQGTSVTVSSTTTPAPRPPTPAPTIASQPLS | | |
| (IL12B (p40) | | LRPEACRPAAGGAVHTRGLDFACDIYIWAPLAGTC | | |
| signal sequence; | | GVLLLSLVITLYCKRGRKKLLYIFKQPFMRPVQTTQ | | |
| IL12B (p40) | | EEDGCSCRFPEEEEGGCELRVKFSRSADAPAYKQG | | |
| (23-328 of WT); | | QNQLYNELNLGRREEYDVLDKRRGRDPEMGGKPR | | |
| Linker ((G4S)3; | | RKNPQEGLYNELQKDKMAEAYSEIGMKGERRRGK | | |
| IL12A (p35) | | GHDGLYQGLSTATKDTYDALHMQALPPR* | | |
| (57-253 of WT); | Encoded | MCHQQLVISWFSLVFLASPLVAIWELKKDVYVVEL | 130 | 131 |
| Linker (GS); ER | Protein 2 | DWYPDAPGEMVVLTCDTPEEDGITWTLDQSSEVL | | |
| (aa 305-549 of | | GSGKTLTIQVKEFGDAGQYTCHKGGEVLSHSLLLL | | |
| WT, R335G, | | HKKEDGIWSTDILKDQKEPKNKTFLRCEAKNYSGR | | |
| L384M, M421G, | | FTCWWLTTISTDLTFSVKSSRGSSDPQGVTCGAATL | | |
| G521R, E523G, | | SAERVRGDNKEYEYSVECQEDSACPAAEESLPIEV | | |
| Y537S, A546T); | | MVDAVHKLKYENYTSSFFIRDIIKPDPPKNLQLKPL | | |
| stop) | | KNSRQVEVSWEYPDTWSTPHSYFSLTFCVQVQGKS | | |
| | | KREKKDRVFTDKTSATVICRKNASISVRAQDRYYS | | |
| | | SSWSEWASVPCSGGGGSGGGGSGGGGSRNLPVAT | | |
| | | PDPGMFPCLHHSQNLLRAVSNMLQKARQTLEFYPC | | |
| | | TSEEIDHEDITKDKTSTVEACLPLELTKNESCLNSRE | | |
| | | TSFITNGSCLASRKTSFMMALCLSSIYEDLKMYQVE | | |
| | | FKTMNAKLLMDPKRQIFLDQNMLAVIDELMQALN | | |
| | | FNSETVPQKSSLEEPDFYKTKIKLCILLHAFRIRAVTI | | |
| | | DRVMSYLNASGSSLALSLTADQMVSALLDAEPPIL | | |
| | | YSEYDPTGPFSEASMMGLLTNLADRELVHMINWA | | |
| | | KRVPGFVDLTLHDQVHLLECAWMEILMIGLVWRS | | |
| | | MEHPGKLLFAPNLLLDRNQGKCVEGGVEIHMLL | | |
| | | ATSSRFRMMNLQGEEFVCLKSIILLNSGVYTFLSST | | |
| | | LKSLEEKDHIHRVLDKITDTLIHLMAKAGLTLQQQ | | |
| | | HQRLAQLLLILSHIRHMSNKRMGHLYSMKCKNVV | | |
| | | PLSDLLLEMLDTHRL* | | |
| OT-001641 (Full | Full | — | — | 132 |
| Construct: CD8α | Construct | | | |
| leader sequence; | Encoded | MALPVTALLLPLALLLHAARPDIQMTQTTSSLSASL | 128 | 129 |
| CD19 scFv; | Protein 1 | GDRVTISCRASQDISKYLNWYQQKPDGTVKLLIYH | | |
| CD8α Hinge-TM; | | TSRLHSGVPSRFSGSGSGTDYSLTISNLEQEDIATYF | | |
| 4-1BB signaling | | CQQGNTLPYTFGGGTKLEITGGGGSGGGGSGGGGS | | |
| domain; CD3 zeta | | EVKLQESGPGLVAPSQSLSVTCTVSGVSLPDYGVS | | |
| signaling domain; | | WIRQPPRKGLEWLGVIWGSETTYYNSALKSRLTIIK | | |
| stop; Spacer; | | DNSKSQVFLKMNSLQTDDTAIYYCAKHYYYGGSY | | |
| IRES; Spacer; | | AMDYWGQGTSVTVSSTTTPAPRPPTPAPTIASQPLS | | |
| (IL12B (p40) | | LRPEACRPAAGGAVHTRGLDFACDIYIWAPLAGTC | | |
| signal sequence; | | GVLLLSLVITLYCKRGRKKLLYIFKQPFMRPVQTTQ | | |
| IL12B (p40) | | EEDGCSCRFPEEEEGGCELRVKFSRSADAPAYKQG | | |
| (23-328 of WT); | | QNQLYNELNLGRREEYDVLDKRRGRDPEMGGKPR | | |
| Linker ((G4S)3; | | RKNPQEGLYNELQKDKMAEAYSEIGMKGERRRGK | | |
| IL12A (p35) | | GHDGLYQGLSTATKDTYDALHMQALPPR* | | |
| (57-253 of WT); | Encoded | MCHQQLVISWFSLVFLASPLVAIWELKKDVYVVEL | 133 | 134 |
| Linker (GS); ER | Protein 2 | DWYPDAPGEMVVLTCDTPEEDGITWTLDQSSEVL | | |
| (aa 305-549 of | | GSGKTLTIQVKEFGDAGQYTCHKGGEVLSHSLLLL | | |
| WT, L384M; | | HKKEDGIWSTDILKDQKEPKNKTFLRCEAKNYSGR | | |
| M421G; T431I; | | FTCWWLTTISTDLTFSVKSSRGSSDPQGVTCGAATL | | |
| G521R,Y537S); | | SAERVRGDNKEYEYSVECQEDSACPAAEESLPIEV | | |
| stop) | | MVDAVHKLKYENYTSSFFIRDIIKPDPPKNLQLKPL | | |
| | | KNSRQVEVSWEYPDTWSTPHSYFSLTFCVQVQGKS | | |
| | | KREKKDRVFTDKTSATVICRKNASISVRAQDRYYS | | |
| | | SSWSEWASVPCSGGGGSGGGGSGGGGSRNLPVAT | | |
| | | PDPGMFPCLHHSQNLLRAVSNMLQKARQTLEFYPC | | |
| | | TSEEIDHEDITKDKTSTVEACLPLELTKNESCLNSRE | | |
| | | TSFITNGSCLASRKTSFMMALCLSSIYEDLKMYQVE | | |
| | | FKTMNAKLLMDPKRQIFLDQNMLAVIDELMQALN | | |
| | | FNSETVPQKSSLEEPDFYKTKIKLCILLHAFRIRAVTI | | |
| | | DRVMSYLNASGSSLALSLTADQMVSALLDAEPPIL | | |
| | | YSEYDPTRPFSEASMMGLLTNLADRELVHMINWA | | |
| | | KRVPGFVDLTLHDQVHLLECAWMEILMIGLVWRS | | |
| | | MEHPGKLLFAPNLLLDRNQGKCVEGGVEIHMLL | | |
| | | AISSRFRMMNLQGEEFVCLKSIILLNSGVYTFLSSTL | | |
| | | KSLEEKDHIHRVLDKITDTLIHLMAKAGLTLQQQH | | |
| | | QRLAQLLLILSHIRHMSNKRMEHLYSMKCKNVVPL | | |
| | | SDLLLEMLDAHRL* | | |
| OT-001642 (Full | Full | — | — | 135 |
| Construct: CD8α | Construct | | | |
| leader sequence; | Encoded | MALPVTALLLPLALLLHAARPDIQMTQTTSSLSASL | 128 | 129 |
| CD19 scFv; | Protein 1 | GDRVTISCRASQDISKYLNWYQQKPDGTVKLLIYH | | |
| CD8α Hinge-TM; | | TSRLHSGVPSRFSGSGSGTDYSLTISNLEQEDIATYF | | |
| 4-1BB signaling | | CQQGNTLPYTFGGGTKLEITGGGGSGGGGSGGGGS | | |
| domain; CD3 zeta | | EVKLQESGPGLVAPSQSLSVTCTVSGVSLPDYGVS | | |
| signaling domain; | | WIRQPPRKGLEWLGVIWGSETTYYNSALKSRLTIIK | | |
| stop; Spacer; | | DNSKSQVFLKMNSLQTDDTAIYYCAKHYYYGGSY | | |
| IRES; Spacer; | | AMDYWGQGTSVTVSSTTTPAPRPPTPAPTIASQPLS | | |
| (IL12B (p40) | | LRPEACRPAAGGAVHTRGLDFACDIYIWAPLAGTC | | |
| signal sequence; | | GVLLLSLVITLYCKRGRKKLLYIFKQPFMRPVQTTQ | | |
| IL12B (p40) | | EEDGCSCRFPEEEEGGCELRVKFSRSADAPAYKQG | | |
| (23-328 of WT); | | QNQLYNELNLGRREEYDVLDKRRGRDPEMGGKPR | | |
| Linker ((G4S)3; | | RKNPQEGLYNELQKDKMAEAYSEIGMKGERRRGK | | |
| IL12A (p35) | | GHDGLYQGLSTATKDTYDALHMQALPPR* | | |
| (57-253 of WT); | Encoded | MCHQQLVISWFSLVFLASPLVAIWELKKDVYVVEL | 136 | 137 |
| Linker (GS); | Protein 2 | DWYPDAPGEMVVLTCDTPEEDGITWTLDQSSEVL | | |
| ER(aa 305-549 of | | GSGKTLTIQVKEFGDAGQYTCHKGGEVLSHSLLLL | | |
| WT, L384M, | | HKKEDGIWSTDILKDQKEPKNKTFLRCEAKNYSGR | | |
| N413D , M421G, | | FTCWWLTTISTDLTFSVKSSRGSSDPQGVTCGAATL | | |
| G521R, Y537S); | | SAERVRGDNKEYEYSVECQEDSACPAAEESLPIEV | | |
| stop) | | MVDAVHKLKYENYTSSFFIRDIIKPDPPKNLQLKPL | | |
| | | KNSRQVEVSWEYPDTWSTPHSYFSLTFCVQVQGKS | | |
| | | KREKKDRVFTDKTSATVICRKNASISVRAQDRYYS | | |
| | | SSWSEWASVPCSGGGGSGGGGSGGGGSRNLPVAT | | |
| | | PDPGMFPCLHHSQNLLRAVSNMLQKARQTLEFYPC | | |
| | | TSEEIDHEDITKDKTSTVEACLPLELTKNESCLNSRE | | |
| | | TSFITNGSCLASRKTSFMMALCLSSIYEDLKMYQVE | | |
| | | FKTMNAKLLMDPKRQIFLDQNMLAVIDELMQALN | | |
| | | FNSETVPQKSSLEEPDFYKTKIKLCILLHAFRIRAVTI | | |
| | | DRVMSYLNASGSSLALSLTADQMVSALLDAEPPIL | | |
| | | YSEYDPTRPFSEASMMGLLTNLADRELVHMINWA | | |
| | | KRVPGFVDLTLHDQVHLLECAWMEILMIGLVWRS | | |
| | | MEHPGKLLFAPNLLLDRDQGKCVEGGVEIHMLL | | |
| | | ATSSRFRMMNLQGEEFVCLKSIILLNSGVYTFLSST | | |
| | | LKSLEEKDHIHRVLDKITDTLIHLMAKAGLTLQQQ | | |
| | | HQRLAQLLLILSHIRHMSNKRMEHLYSMKCKNVV | | |
| | | PLSDLLLEMLDAHRL* | | |
| OT-001643 (Full | Full | — | — | 138 |
| Construct: CD8α | Construct | | | |
| leader sequence; | Encoded | MALPVTALLLPLALLLHAARPDIQMTQTTSSLSASL | 128 | 129 |
| CD19 scFv; | Protein 1 | GDRVTISCRASQDISKYLNWYQQKPDGTVKLLIYH | | |
| CD8α Hinge-TM; | | TSRLHSGVPSRFSGSGSGTDYSLTISNLEQEDIATYF | | |
| 4-1BB signaling | | CQQGNTLPYTFGGGTKLEITGGGGSGGGGSGGGGS | | |
| domain; CD3 zeta | | EVKLQESGPGLVAPSQSLSVTCTVSGVSLPDYGVS | | |
| signaling domain; | | WIRQPPRKGLEWLGVIWGSETTYYNSALKSRLTIIK | | |
| stop; Spacer; | | DNSKSQVFLKMNSLQTDDTAIYYCAKHYYYGGSY | | |
| IRES; Spacer; | | AMDYWGQGTSVTVSSTTTPAPRPPTPAPTIASQPLS | | |
| (IL12B (p40) | | LRPEACRPAAGGAVHTRGLDFACDIYIWAPLAGTC | | |
| signal sequence; | | GVLLLSLVITLYCKRGRKKLLYIFKQPFMRPVQTTQ | | |
| IL12B (p40) | | EEDGCSCRFPEEEEGGCELRVKFSRSADAPAYKQG | | |
| (23-328 of WT); | | QNQLYNELNLGRREEYDVLDKRRGRDPEMGGKPR | | |
| Linker ((G4S)3; | | RKNPQEGLYNELQKDKMAEAYSEIGMKGERRRGK | | |
| IL12A (p35) | | GHDGLYQGLSTATKDTYDALHMQALPPR* | | |
| (57-253 of WT); | Encoded | MCHQQLVISWFSLVFLASPLVAIWELKKDVYVVEL | 139 | 140 |
| Linker (GS); ER | Protein 2 | DWYPDAPGEMVVLTCDTPEEDGITWTLDQSSEVL | | |
| (aa 305-549 of | | GSGKTLTIQVKEFGDAGQYTCHKGGEVLSHSLLLL | | |
| WT, L384M, | | HKKEDGIWSTDILKDQKEPKNKTFLRCEAKNYSGR | | |
| M421G, N519S, | | FTCWWLTTISTDLTFSVKSSRGSSDPQGVTCGAATL | | |
| G521R, Y537S); | | SAERVRGDNKEYEYSVECQEDSACPAAEESLPIEV | | |
| stop) | | MVDAVHKLKYENYTSSFFIRDIIKPDPPKNLQLKPL | | |
| | | KNSRQVEVSWEYPDTWSTPHSYFSLTFCVQVQGKS | | |
| | | KREKKDRVFTDKTSATVICRKNASISVRAQDRYYS | | |
| | | SSWSEWASVPCSGGGGSGGGGSGGGGSRNLPVAT | | |
| | | PDPGMFPCLHHSQNLLRAVSNMLQKARQTLEFYPC | | |
| | | TSEEIDHEDITKDKTSTVEACLPLELTKNESCLNSRE | | |
| | | TSFITNGSCLASRKTSFMMALCLSSIYEDLKMYQVE | | |
| | | FKTMNAKLLMDPKRQIFLDQNMLAVIDELMQALN | | |
| | | FNSETVPQKSSLEEPDFYKTKIKLCILLHAFRIRAVTI | | |
| | | DRVMSYLNASGSSLALSLTADQMVSALLDAEPPIL | | |
| | | YSEYDPTRPFSEASMMGLLTNLADRELVHMINWA | | |
| | | KRVPGFVDLTLHDQVHLLECAWMEILMIGLVWRS | | |
| | | MEHPGKLLFAPNLLLDRNQGKCVEGGVEIFDMLL | | |
| | | ATSSRFRMMNLQGEEFVCLKSIILLNSGVYTFLSST | | |
| | | LKSLEEKDHIHRVLDKITDTLIHLMAKAGLTLQQQ | | |
| | | HQRLAQLLLILSHIRHMSSKRMEHLYSMKCKNVVP | | |
| | | LSDLLLEMLDAHRL* | | |
| OT-001644 (Full | Full | — | — | 141 |
| Construct: CD8α | Construct | | | |
| leader sequence; | Encoded | MALPVTALLLPLALLLHAARPDIQMTQTTSSLSASL | 128 | 129 |
| CD19 scFv; | Protein 1 | GDRVTISCRASQDISKYLNWYQQKPDGTVKLLIYH | | |
| CD8α Hinge-TM; | | TSRLHSGVPSRFSGSGSGTDYSLTISNLEQEDIATYF | | |
| 4-1BB signaling | | CQQGNTLPYTFGGGTKLEITGGGGSGGGGSGGGGS | | |
| domain; CD3 zeta | | EVKLQESGPGLVAPSQSLSVTCTVSGVSLPDYGVS | | |
| signaling domain; | | WIRQPPRKGLEWLGVIWGSETTYYNSALKSRLTIIK | | |
| stop; Spacer; | | DNSKSQVFLKMNSLQTDDTAIYYCAKHYYYGGSY | | |
| IRES; Spacer; | | AMDYWGQGTSVTVSSTTTPAPRPPTPAPTIASQPLS | | |
| (IL12B (p40) | | LRPEACRPAAGGAVHTRGLDFACDIYIWAPLAGTC | | |
| signal sequence; | | GVLLLSLVITLYCKRGRKKLLYIFKQPFMRPVQTTQ | | |
| IL12B (p40) | | EEDGCSCRFPEEEEGGCELRVKFSRSADAPAYKQG | | |
| (23-328 of WT); | | QNQLYNELNLGRREEYDVLDKRRGRDPEMGGKPR | | |
| Linker ((G4S)3; | | RKNPQEGLYNELQKDKMAEAYSEIGMKGERRRGK | | |
| IL12A (p35) | | GHDGLYQGLSTATKDTYDALHMQALPPR* | | |
| (57-253 of WT); | Encoded | MCHQQLVISWFSLVFLASPLVAIWELKKDVYVVEL | 142 | 143 |
| Linker (GS); ER | Protein 2 | DWYPDAPGEMVVLTCDTPEEDGITWTLDQSSEVL | | |
| (305-549 of WT, | | GSGKTLTIQVKEFGDAGQYTCHKGGEVLSHSLLLL | | |
| L384M, M421G, | | HKKEDGIWSTDILKDQKEPKNKTFLRCEAKNYSGR | | |
| Q502R, G521R, | | FTCWWLTTISTDLTFSVKSSRGSSDPQGVTCGAATL | | |
| Y537S); stop) | | SAERVRGDNKEYEYSVECQEDSACPAAEESLPIEV | | |
| | | MVDAVHKLKYENYTSSFFIRDIIKPDPPKNLQLKPL | | |
| | | KNSRQVEVSWEYPDTWSTPHSYFSLTFCVQVQGKS | | |
| | | KREKKDRVFTDKTSATVICRKNASISVRAQDRYYS | | |
| | | SSWSEWASVPCSGGGGSGGGGSGGGGSRNLPVAT | | |
| | | PDPGMFPCLHHSQNLLRAVSNMLQKARQTLEFYPC | | |
| | | TSEEIDHEDITKDKTSTVEACLPLELTKNESCLNSRE | | |
| | | TSFITNGSCLASRKTSFMMALCLSSIYEDLKMYQVE | | |
| | | FKTMNAKLLMDPKRQIFLDQNMLAVIDELMQALN | | |
| | | FNSETVPQKSSLEEPDFYKTKIKLCILLHAFRIRAVTI | | |
| | | DRVMSYLNASGSSLALSLTADQMVSALLDAEPPIL | | |
| | | YSEYDPTRPFSEASMMGLLTNLADRELVHMINWA | | |
| | | KRVPGFVDLTLHDQVHLLECAWMEILMIGLVWRS | | |
| | | MEHPGKLLFAPNLLLDRNQGKCVEGGVEIHMLL | | |
| | | ATSSRFRMMNLQGEEFVCLKSIILLNSGVYTFLSST | | |
| | | LKSLEEKDHIHRVLDKITDTLIHLMAKAGLTLQQQ | | |
| | | HRRLAQLLLILSHIRHMSNKRMEHLYSMKCKNVVP | | |
| | | LSDLLLEMLDAHRL* | | |
| OT-001645 (Full | Full | — | — | 144 |
| Construct: CD8α | Construct | | | |
| leader sequence; | Encoded | MALPVTALLLPLALLLHAARPDIQMTQTTSSLSASL | 128 | 129 |
| CD19 scFv; | Protein 1 | GDRVTISCRASQDISKYLNWYQQKPDGTVKLLIYH | | |
| CD8α Hinge-TM; | | TSRLHSGVPSRFSGSGSGTDYSLTISNLEQEDIATYF | | |
| 4-1BB signaling | | CQQGNTLPYTFGGGTKLEITGGGGSGGGGSGGGGS | | |
| domain; CD3 zeta | | EVKLQESGPGLVAPSQSLSVTCTVSGVSLPDYGVS | | |
| signaling domain; | | WIRQPPRKGLEWLGVIWGSETTYYNSALKSRLTIIK | | |
| stop; Spacer; | | DNSKSQVFLKMNSLQTDDTAIYYCAKHYYYGGSY | | |
| IRES; Spacer; | | AMDYWGQGTSVTVSSTTTPAPRPPTPAPTIASQPLS | | |
| (IL12B (p40) | | LRPEACRPAAGGAVHTRGLDFACDIYIWAPLAGTC | | |
| signal sequence; | | GVLLLSLVITLYCKRGRKKLLYIFKQPFMRPVQTTQ | | |
| IL12B (p40) | | EEDGCSCRFPEEEEGGCELRVKFSRSADAPAYKQG | | |
| (23-328 of WT); | | QNQLYNELNLGRREEYDVLDKRRGRDPEMGGKPR | | |
| Linker ((G4S)3; | | RKNPQEGLYNELQKDKMAEAYSEIGMKGERRRGK | | |
| IL12A (p35) | | GHDGLYQGLSTATKDTYDALHMQALPPR* | | |
| (57-253 of WT); | Encoded | MCHQQLVISWFSLVFLASPLVAIWELKKDVYVVEL | 145 | 146 |
| Linker (GS); ER | Protein 2 | DWYPDAPGEMVVLTCDTPEEDGITWTLDQSSEVL | | |
| (aa 305-549 of | | GSGKTLTIQVKEFGDAGQYTCHKGGEVLSHSLLLL | | |
| WT, T371A, | | HKKEDGIWSTDILKDQKEPKNKTFLRCEAKNYSGR | | |
| L384M, M421G, | | FTCWWLTTISTDLTFSVKSSRGSSDPQGVTCGAATL | | |
| N519S, G521R, | | SAERVRGDNKEYEYSVECQEDSACPAAEESLPIEV | | |
| Y537S); stop) | | MVDAVHKLKYENYTSSFFIRDIIKPDPPKNLQLKPL | | |
| | | KNSRQVEVSWEYPDTWSTPHSYFSLTFCVQVQGKS | | |
| | | KREKKDRVFTDKTSATVICRKNASISVRAQDRYYS | | |
| | | SSWSEWASVPCSGGGGSGGGGSGGGGSRNLPVAT | | |
| | | PDPGMFPCLHHSQNLLRAVSNMLQKARQTLEFYPC | | |
| | | TSEEIDHEDITKDKTSTVEACLPLELTKNESCLNSRE | | |
| | | TSFITNGSCLASRKTSFMMALCLSSIYEDLKMYQVE | | |
| | | FKTMNAKLLMDPKRQIFLDQNMLAVIDELMQALN | | |
| | | FNSETVPQKSSLEEPDFYKTKIKLCILLHAFRIRAVTI | | |
| | | DRVMSYLNASGSSLALSLTADQMVSALLDAEPPIL | | |
| | | YSEYDPTRPFSEASMMGLLTNLADRELVHMINWA | | |
| | | KRVPGFVDLALHDQVHLLECAWMEILMIGLVWRS | | |
| | | MEHPGKLLFAPNLLLDRNQGKCVEGGVEIHMLL | | |
| | | ATSSRFRMMNLQGEEFVCLKSIILLNSGVYTFLSST | | |
| | | LKSLEEKDHIHRVLDKITDTLIHLMAKAGLTLQQQ | | |
| | | HQRLAQLLLILSHIRHMSSKRMEHLYSMKCKNVVP | | |
| | | LSDLLLEMLDAHRL* | | |
| OT-001646 (Full | Full | — | — | 147 |
| Construct: CD8α | Construct | | | |
| leader sequence; | Encoded | MALPVTALLLPLALLLHAARPDIQMTQTTSSLSASL | 128 | 129 |
| CD19 scFv; | Protein 1 | GDRVTISCRASQDISKYLNWYQQKPDGTVKLLIYH | | |
| CD8α Hinge-TM; | | TSRLHSGVPSRFSGSGSGTDYSLTISNLEQEDIATYF | | |
| 4-1BB signaling | | CQQGNTLPYTFGGGTKLEITGGGGSGGGGSGGGGS | | |
| domain; CD3 zeta | | EVKLQESGPGLVAPSQSLSVTCTVSGVSLPDYGVS | | |
| signaling domain; | | WIRQPPRKGLEWLGVIWGSETTYYNSALKSRLTIIK | | |
| stop; Spacer; | | DNSKSQVFLKMNSLQTDDTAIYYCAKHYYYGGSY | | |
| IRES; Spacer; | | AMDYWGQGTSVTVSSTTTPAPRPPTPAPTIASQPLS | | |
| (IL12B (p40) | | LRPEACRPAAGGAVHTRGLDFACDIYIWAPLAGTC | | |
| signal sequence; | | GVLLLSLVITLYCKRGRKKLLYIFKQPFMRPVQTTQ | | |
| IL12B (p40) | | EEDGCSCRFPEEEEGGCELRVKFSRSADAPAYKQG | | |
| (23-328 of WT); | | QNQLYNELNLGRREEYDVLDKRRGRDPEMGGKPR | | |
| Linker ((G4S)3; | | RKNPQEGLYNELQKDKMAEAYSEIGMKGERRRGK | | |
| IL12A (p35) | | GHDGLYQGLSTATKDTYDALHMQALPPR* | | |
| (57-253 of WT); | Encoded | MCHQQLVISWFSLVFLASPLVAIWELKKDVYVVEL | 148 | 149 |
| Linker (GS); ER | Protein 2 | DWYPDAPGEMVVLTCDTPEEDGITWTLDQSSEVL | | |
| (aa 305-549 of | | GSGKTLTIQVKEFGDAGQYTCHKGGEVLSHSLLLL | | |
| WT, S305N, | | HKKEDGIWSTDILKDQKEPKNKTFLRCEAKNYSGR | | |
| L384M, M421G, | | FTCWWLTTISTDLTFSVKSSRGSSDPQGVTCGAATL | | |
| G442V, G521R, | | SAERVRGDNKEYEYSVECQEDSACPAAEESLPIEV | | |
| Y537S); stop) | | MVDAVHKLKYENYTSSFFIRDIIKPDPPKNLQLKPL | | |
| | | KNSRQVEVSWEYPDTWSTPHSYFSLTFCVQVQGKS | | |
| | | KREKKDRVFTDKTSATVICRKNASISVRAQDRYYS | | |
| | | SSWSEWASVPCSGGGGSGGGGSGGGGSRNLPVAT | | |
| | | PDPGMFPCLHHSQNLLRAVSNMLQKARQTLEFYPC | | |
| | | TSEEIDHEDITKDKTSTVEACLPLELTKNESCLNSRE | | |
| | | TSFITNGSCLASRKTSFMMALCLSSIYEDLKMYQVE | | |
| | | FKTMNAKLLMDPKRQIFLDQNMLAVIDELMQALN | | |
| | | FNSETVPQKSSLEEPDFYKTKIKLCILLHAFRIRAVTI | | |
| | | DRVMSYLNASGSNLALSLTADQMVSALLDAEPPIL | | |
| | | YSEYDPTRPFSEASMMGLLTNLADRELVHMINWA | | |
| | | KRVPGFVDLTLHDQVHLLECAWMEILMIGLVWRS | | |
| | | MEHPGKLLFAPNLLLDRNQGKCVEGGVEIFDMLL | | |
| | | ATSSRFRMMNLQVEEFVCLKSIILLNSGVYTFLSST | | |
| | | LKSLEEKDHIHRVLDKITDTLIHLMAKAGLTLQQQ | | |
| | | HQRLAQLLLILSHIRHMSNKRMEHLYSMKCKNVV | | |
| | | PLSDLLLEMLDAHRL* | | |
| OT-001647 (Full | Full | — | — | 150 |
| Construct: CD8α | Construct | | | |
| leader sequence; | Encoded | MALPVTALLLPLALLLHAARPDIQMTQTTSSLSASL | 128 | 129 |
| CD19 scFv; | Protein 1 | GDRVTISCRASQDISKYLNWYQQKPDGTVKLLIYH | | |
| CD8α Hinge-TM; | | TSRLHSGVPSRFSGSGSGTDYSLTISNLEQEDIATYF | | |
| 4-1BB signaling | | CQQGNTLPYTFGGGTKLEITGGGGSGGGGSGGGGS | | |
| domain; CD3 zeta | | EVKLQESGPGLVAPSQSLSVTCTVSGVSLPDYGVS | | |
| signaling domain; | | WIRQPPRKGLEWLGVIWGSETTYYNSALKSRLTIIK | | |
| stop; Spacer; | | DNSKSQVFLKMNSLQTDDTAIYYCAKHYYYGGSY | | |
| IRES; Spacer; | | AMDYWGQGTSVTVSSTTTPAPRPPTPAPTIASQPLS | | |
| (IL12B (p40) | | LRPEACRPAAGGAVHTRGLDFACDIYIWAPLAGTC | | |
| signal sequence; | | GVLLLSLVITLYCKRGRKKLLYIFKQPFMRPVQTTQ | | |
| IL12B (p40) | | EEDGCSCRFPEEEEGGCELRVKFSRSADAPAYKQG | | |
| (23-328 of WT); | | QNQLYNELNLGRREEYDVLDKRRGRDPEMGGKPR | | |
| Linker ((G4S)3; | | RKNPQEGLYNELQKDKMAEAYSEIGMKGERRRGK | | |
| IL12A (p35) | | GHDGLYQGLSTATKDTYDALHMQALPPR* | | |
| (57-253 of WT); | Encoded | MCHQQLVISWFSLVFLASPLVAIWELKKDVYVVEL | 151 | 152 |
| Linker (GS); ER | Protein 2 | DWYPDAPGEMVVLTCDTPEEDGITWTLDQSSEVL | | |
| (aa 305-549 of | | GSGKTLTIQVKEFGDAGQYTCHKGGEVLSHSLLLL | | |
| WT, R335G, | | HKKEDGIWSTDILKDQKEPKNKTFLRCEAKNYSGR | | |
| L384M, M421G, | | FTCWWLTTISTDLTFSVKSSRGSSDPQGVTCGAATL | | |
| N519S, G521R, | | SAERVRGDNKEYEYSVECQEDSACPAAEESLPIEV | | |
| Y537S); stop) | | MVDAVHKLKYENYTSSFFIRDIIKPDPPKNLQLKPL | | |
| | | KNSRQVEVSWEYPDTWSTPHSYFSLTFCVQVQGKS | | |
| | | KREKKDRVFTDKTSATVICRKNASISVRAQDRYYS | | |
| | | SSWSEWASVPCSGGGGSGGGGSGGGGSRNLPVAT | | |
| | | PDPGMFPCLHHSQNLLRAVSNMLQKARQTLEFYPC | | |
| | | TSEEIDHEDITKDKTSTVEACLPLELTKNESCLNSRE | | |
| | | TSFITNGSCLASRKTSFMMALCLSSIYEDLKMYQVE | | |
| | | FKTMNAKLLMDPKRQIFLDQNMLAVIDELMQALN | | |
| | | FNSETVPQKSSLEEPDFYKTKIKLCILLHAFRIRAVTI | | |
| | | DRVMSYLNASGSSLALSLTADQMVSALLDAEPPIL | | |
| | | YSEYDPTGPFSEASMMGLLTNLADRELVHMINWA | | |
| | | KRVPGFVDLTLHDQVHLLECAWMEILMIGLVWRS | | |
| | | MEHPGKLLFAPNLLLDRNQGKCVEGGVEIHMLL | | |
| | | ATSSRFRMMNLQGEEFVCLKSIILLNSGVYTFLSST | | |
| | | LKSLEEKDHIHRVLDKITDTLIHLMAKAGLTLQQQ | | |
| | | HQRLAQLLLILSHIRHMSSKRMEHLYSMKCKNVVP | | |
| | | LSDLLLEMLDAHRL* | | |
| OT-001648 (Full | Full | — | — | 153 |
| Construct: CD8α | Construct | | | |
| leader sequence; | Encoded | MALPVTALLLPLALLLHAARPDIQMTQTTSSLSASL | 128 | 129 |
| CD19 scFv; | Protein 1 | GDRVTISCRASQDISKYLNWYQQKPDGTVKLLIYH | | |
| CD8α Hinge-TM; | | TSRLHSGVPSRFSGSGSGTDYSLTISNLEQEDIATYF | | |
| 4-1BB signaling | | CQQGNTLPYTFGGGTKLEITGGGGSGGGGSGGGGS | | |
| domain; CD3 zeta | | EVKLQESGPGLVAPSQSLSVTCTVSGVSLPDYGVS | | |
| signaling domain; | | WIRQPPRKGLEWLGVIWGSETTYYNSALKSRLTIIK | | |
| stop; Spacer; | | DNSKSQVFLKMNSLQTDDTAIYYCAKHYYYGGSY | | |
| IRES; Spacer; | | AMDYWGQGTSVTVSSTTTPAPRPPTPAPTIASQPLS | | |
| IL12B (p40) | | LRPEACRPAAGGAVHTRGLDFACDIYIWAPLAGTC | | |
| signal sequence; | | GVLLLSLVITLYCKRGRKKLLYIFKQPFMRPVQTTQ | | |
| IL12B (p40) | | EEDGCSCRFPEEEEGGCELRVKFSRSADAPAYKQG | | |
| (23-328 of WT); | | QNQLYNELNLGRREEYDVLDKRRGRDPEMGGKPR | | |
| Linker ((G4S)3; | | RKNPQEGLYNELQKDKMAEAYSEIGMKGERRRGK | | |
| IL12A (p35) | | GHDGLYQGLSTATKDTYDALHMQALPPR* | | |
| (57-253 of WT); | Encoded | MCHQQLVISWFSLVFLASPLVAIWELKKDVYVVEL | 154 | 155 |
| Linker (GS); ER | Protein 2 | DWYPDAPGEMVVLTCDTPEEDGITWTLDQSSEVL | | |
| (aa 305-549 of | | GSGKTLTIQVKEFGDAGQYTCHKGGEVLSHSLLLL | | |
| WT, L384M, | | HKKEDGIWSTDILKDQKEPKNKTFLRCEAKNYSGR | | |
| M421G, G521R, | | FTCWWLTTISTDLTFSVKSSRGSSDPQGVTCGAATL | | |
| Y537S); stop) | | SAERVRGDNKEYEYSVECQEDSACPAAEESLPIEV | | |
| | | MVDAVHKLKYENYTSSFFIRDIIKPDPPKNLQLKPL | | |
| | | KNSRQVEVSWEYPDTWSTPHSYFSLTFCVQVQGKS | | |
| | | KREKKDRVFTDKTSATVICRKNASISVRAQDRYYS | | |
| | | SSWSEWASVPCSGGGGSGGGGSGGGGSRNLPVAT | | |
| | | PDPGMFPCLHHSQNLLRAVSNMLQKARQTLEFYPC | | |
| | | TSEEIDHEDITKDKTSTVEACLPLELTKNESCLNSRE | | |
| | | TSFITNGSCLASRKTSFMMALCLSSIYEDLKMYQVE | | |
| | | FKTMNAKLLMDPKRQIFLDQNMLAVIDELMQALN | | |
| | | FNSETVPQKSSLEEPDFYKTKIKLCILLHAFRIRAVTI | | |
| | | DRVMSYLNASGSSLALSLTADQMVSALLDAEPPIL | | |
| | | YSEYDPTRPFSEASMMGLLTNLADRELVHMINWA | | |
| | | KRVPGFVDLTLHDQVHLLECAWMEILMIGLVWRS | | |
| | | MEHPGKLLFAPNLLLDRNQGKCVEGGVEIHMLL | | |
| | | ATSSRFRMMNLQGEEFVCLKSIILLNSGVYTFLSST | | |
| | | LKSLEEKDHIHRVLDKITDTLIHLMAKAGLTLQQQ | | |
| | | HQRLAQLLLILSHIRHMSNKRMEHLYSMKCKNVV | | |
| | | PLSDLLLEMLDAHRL* | | |
| OT-001736 (Full | Full | MALPVTALLLPLALLLHAARPDIQMTQTTSSLSASL | 156 | 157 |
| Construct: CD8α | Construct | GDRVTISCRASQDISKYLNWYQQKPDGTVKLLIYH | | |
| leader sequence; | | TSRLHSGVPSRFSGSGSGTDYSLTISNLEQEDIATYF | | |
| CD19 scFv; | | CQQGNTLPYTFGGGTKLEITGGGGSGGGGSGGGGS | | |
| CD8α Hinge-TM; | | EVKLQESGPGLVAPSQSLSVTCTVSGVSLPDYGVS | | |
| 4-1BB signaling | | WIRQPPRKGLEWLGVIWGSETTYYNSALKSRLTIIK | | |
| domain; CD3 zeta | | DNSKSQVFLKMNSLQTDDTAIYYCAKHYYYGGSY | | |
| signaling domain; | | AMDYWGQGTSVTVSSTTTPAPRPPTPAPTIASQPLS | | |
| Linker (GS); P2A | | LRPEACRPAAGGAVHTRGLDFACDIYIWAPLAGTC | | |
| cleavage site; | | GVLLLSLVITLYCKRGRKKLLYIFKQPFMRPVQTTQ | | |
| IL12B (p40) | | EEDGCSCRFPEEEEGGCELRVKFSRSADAPAYKQG | | |
| signal sequence; | | QNQLYNELNLGRREEYDVLDKRRGRDPEMGGKPR | | |
| IL12B (p40) | | RKNPQEGLYNELQKDKMAEAYSEIGMKGERRRGK | | |
| (23-328 of WT); | | GHDGLYQGLSTATKDTYDALHMQALPPRGSATNF | | |
| Linker ((G4S)3; | | SLLKQAGDVEENPGPMCHQQLVISWFSLVFLASPL | | |
| IL12A (p35) | | VAIWELKKDVYVVELDWYPDAPGEMVVLTCDTPE | | |
| (57-253 of WT); | | EDGITWTLDQSSEVLGSGKTLTIQVKEFGDAGQYT | | |
| Linker (GS); | | CHKGGEVLSHSLLLLHKKEDGIWSTDILKDQKEPK | | |
| ER (aa 305-549 of | | NKTFLRCEAKNYSGRFTCWWLTTISTDLTFSVKSS | | |
| WT, L384M, | | RGSSDPQGVTCGAATLSAERVRGDNKEYEYSVEC | | |
| N413D , M421G, | | QEDSACPAAEESLPIEVMVDAVHKLKYENYTSSFFI | | |
| G521R, Y537S); | | RDIIKPDPPKNLQLKPLKNSRQVEVSWEYPDTWSTP | | |
| stop) | | HSYFSLTFCVQVQGKSKREKKDRVFTDKTSATVIC | | |
| | | RKNASISVRAQDRYYSSSWSEWASVPCSGGGGSG | | |
| | | GGGSGGGGSRNLPVATPDPGMFPCLHHSQNLLRA | | |
| | | VSNMLQKARQTLEFYPCTSEEIDHEDITKDKTSTVE | | |
| | | ACLPLELTKNESCLNSRETSFITNGSCLASRKTSFM | | |
| | | MALCLSSIYEDLKMYQVEFKTMNAKLLMDPKRQI | | |
| | | FLDQNMLAVIDELMQALNFNSETVPQKSSLEEPDF | | |
| | | YKTKIKLCILLHAFRIRAVTIDRVMSYLNASGSSLA | | |
| | | LSLTADQMVSALLDAEPPILYSEYDPTRPFSEASMM | | |
| | | GLLTNLADRELVHMINWAKRVPGFVDLTLHDQVH | | |
| | | LLECAWMEILMIGLVWRSMEHPGKLLFAPNLLLDR | | |
| | | DQGKCVEGGVEIFDMLLATSSRFRMMNLQGEEFV | | |
| | | CLKSIILLNSGVYTFLSSTLKSLEEKDHIHRVLDKIT | | |
| | | DTLIHLMAKAGLTLQQQHQRLAQLLLILSHIRHMS | | |
| | | NKRMEHLYSMKCKNVVPLSDLLLEMLDAHRL* | | |
| OT-001649 | Full | MALPVTALLLPLALLLHAARPDIQMTQTTSSLSASL | 373 | 374 |
| (CD8α leader | Construct | GDRVTISCRASQDISKYLNWYQQKPDGTVKLLIYH | | |
| sequence; CD19 | | TSRLHSGVPSRFSGSGSGTDYSLTISNLEQEDIATYF | | |
| scFv; CD8α | | CQQGNTLPYTFGGGTKLEITGGGGSGGGGSGGGGS | | |
| Hinge-TM; 4- | | EVKLQESGPGLVAPSQSLSVTCTVSGVSLPDYGVS | | |
| 1BB signaling | | WIRQPPRKGLEWLGVIWGSETTYYNSALKSRLTIIK | | |
| domain; CD3 zeta | | DNSKSQVFLKMNSLQTDDTAIYYCAKHYYYGGSY | | |
| signaling domain; | | AMDYWGQGTSVTVSSTTTPAPRPPTPAPTIASQPLS | | |
| Linker (GS); P2A | | LRPEACRPAAGGAVHTRGLDFACDIYIWAPLAGTC | | |
| cleavage site; | | GVLLLSLVITLYCKRGRKKLLYIFKQPFMRPVQTTQ | | |
| IL12B (p40) | | EEDGCSCRFPEEEEGGCELRVKFSRSADAPAYKQG | | |
| signal sequence; | | QNQLYNELNLGRREEYDVLDKRRGRDPEMGGKPR | | |
| IL12B (p40) | | RKNPQEGLYNELQKDKMAEAYSEIGMKGERRRGK | | |
| (23-328 of WT); | | GHDGLYQGLSTATKDTYDALHMQALPPRGSATNF | | |
| Linker ((G4S)3; | | SLLKQAGDVEENPGPMCHQQLVISWFSLVFLASPL | | |
| IL12A (p35) | | VAIWELKKDVYVVELDWYPDAPGEMVVLTCDTPE | | |
| (57-253 of WT); | | EDGITWTLDQSSEVLGSGKTLTIQVKEFGDAGQYT | | |
| Linker (GS); ER | | CHKGGEVLSHSLLLLHKKEDGIWSTDILKDQKEPK | | |
| (aa 305-549 of | | NKTFLRCEAKNYSGRFTCWWLTTISTDLTFSVKSSR | | |
| WT, L384M, | | GSSDPQGVTCGAATLSAERVRGDNKEYEYSVECQE | | |
| N413T, M421G, | | DSACPAAEESLPIEVMVDAVHKLKYENYTSSFFIRD | | |
| G521R, Y537S); | | IIKPDPPKNLQLKPLKNSRQVEVSWEYPDTWSTPHS | | |
| stop) | | YFSLTFCVQVQGKSKREKKDRVFTDKTSATVICRK | | |
| | | NASISVRAQDRYYSSSWSEWASVPCSGGGGSGGGG | | |
| | | SGGGGSRNLPVATPDPGMFPCLHHSQNLLRAVSNM | | |
| | | LQKARQTLEFYPCTSEEIDHEDITKDKTSTVEACLPL | | |
| | | ELTKNESCLNSRETSFITNGSCLASRKTSFMMALCL | | |
| | | SSIYEDLKMYQVEFKTMNAKLLMDPKRQIFLDQN | | |
| | | MLAVIDELMQALNFNSETVPQKSSLEEPDFYKTKIK | | |
| | | LCILLHAFRIRAVTIDRVMSYLNASGSSLALSLTAD | | |
| | | QMVSALLDAEPPILYSEYDPTRPFSEASMMGLLTNL | | |
| | | ADRELVHMINWAKRVPGFVDLTLHDQVHLLECAW | | |
| | | MEILMIGLVWRSMEHPGKLLFAPNLLLDRTQGKCV | | |
| | | EGGVEIFDMLLATSSRFRMMNLQGEEFVCLKSIILL | | |
| | | NSGVYTFLSSTLKSLEEKDHIHRVLDKITDTLIHLM | | |
| | | AKAGLTLQQQHQRLAQLLLILSHIRHMSNKRMEHL | | |
| | | YSMKCKNVVPLSDLLLEMLDAHRL* | | |
| OT-001651 | Full | MALPVTALLLPLALLLHAARPDIQMTQTTSSLSASL | 426 | 427 |
| (CD8a leader; | construct | GDRVTISCRASQDISKYLNWYQQKPDGTVKLLIYH | | |
| CD19 scFv; CD8α | | TSRLHSGVPSRFSGSGSGTDYSLTISNLEQEDIATYF | | |
| hinge-TM; 4-1BB | | CQQGNTLPYTFGGGTKLEITGGGGSGGGGSGGGGS | | |
| intracellular | | EVKLQESGPGLVAPSQSLSVTCTVSGVSLPDYGVS | | |
| signaling domain; | | WIRQPPRKGLEWLGVIWGSETTYYNSALKSRLTIIK | | |
| CD3 zeta | | DNSKSQVFLKMNSLQTDDTAIYYCAKHYYYGGSY | | |
| signaling domain; | | AMDYWGQGTSVTVSSTTTPAPRPPTPAPTIASQPLS | | |
| Linker (GS); P2A | | LRPEACRPAAGGAVHTRGLDFACDIYIWAPLAGTC | | |
| cleavage site; | | GVLLLSLVITLYCKRGRKKLLYIFKQPFMRPVQTTQ | | |
| Interleukin-12 | | EEDGCSCRFPEEEEGGCELRVKFSRSADAPAYKQG | | |
| subunit beta (p40) | | QNQLYNELNLGRREEYDVLDKRRGRDPEMGGKPR | | |
| leader; IL12B | | RKNPQEGLYNELQKDKMAEAYSEIGMKGERRRGK | | |
| (p40) (23-328 of | | GHDGLYQGLSTATKDTYDALHMQALPPRGSATNF | | |
| WT); Linker | | SLLKQAGDVEENPGPMCHQQLVISWFSLVFLASPL | | |
| ((G4S)3); IL12A | | VAIWELKKDVYVVELDWYPDAPGEMVVLTCDTPE | | |
| (p35) (57-253 of | | EDGITWTLDQSSEVLGSGKTLTIQVKEFGDAGQYT | | |
| WT); Linker | | CHKGGEVLSHSLLLLHKKEDGIWSTDILKDQKEPK | | |
| (GS); ER (aa | | NKTFLRCEAKNYSGRFTCWWLTTISTDLTFSVKSSR | | |
| 305-549 of WT, | | GSSDPQGVTCGAATLSAERVRGDNKEYEYSVECQE | | |
| L384M, M421G, | | DSACPAAEESLPIEVMVDAVHKLKYENYTSSFFIRD | | |
| Q502H, G521R, | | IIKPDPPKNLQLKPLKNSRQVEVSWEYPDTWSTPHS | | |
| Y537S); stop) | | YFSLTFCVQVQGKSKREKKDRVFTDKTSATVICRK | | |
| | | NASISVRAQDRYYSSSWSEWASVPCSGGGGSGGGG | | |
| | | SGGGGSRNLPVATPDPGMFPCLHHSQNLLRAVSNM | | |
| | | LQKARQTLEFYPCTSEEIDHEDITKDKTSTVEACLPL | | |
| | | ELTKNESCLNSRETSFITNGSCLASRKTSFMMALCL | | |
| | | SSIYEDLKMYQVEFKTMNAKLLMDPKRQIFLDQN | | |
| | | MLAVIDELMQALNFNSETVPQKSSLEEPDFYKTKIK | | |
| | | LCILLHAFRIRAVTIDRVMSYLNASGSSLALSLTAD | | |
| | | QMVSALLDAEPPILYSEYDPTRPFSEASMMGLLTNL | | |
| | | ADRELVHMINWAKRVPGFVDLTLHDQVHLLECAW | | |
| | | MEILMIGLVWRSMEHPGKLLFAPNLLLDRNQGKCV | | |
| | | EGGVEIFDMLLATSSRFRMMNLQGEEFVCLKSIILL | | |
| | | NSGVYTFLSSTLKSLEEKDHIHRVLDKITDTLIHLM | | |
| | | AKAGLTLQQQHHRLAQLLLILSHIRHMSNKRMEHL | | |
| | | YSMKCKNVVPLSDLLLEMLDAHRL* | | |
| OT-001652 | Full | MALPVTALLLPLALLLHAARPDIQMTQTTSSLSASL | 375 | 376 |
| (CD8α leader | Construct | GDRVTISCRASQDISKYLNWYQQKPDGTVKLLIYH | | |
| sequence; CD19 | | TSRLHSGVPSRFSGSGSGTDYSLTISNLEQEDIATYF | | |
| scFv; CD8α | | CQQGNTLPYTFGGGTKLEITGGGGSGGGGSGGGGS | | |
| Hinge-TM; 4- | | EVKLQESGPGLVAPSQSLSVTCTVSGVSLPDYGVS | | |
| 1BB signaling | | WIRQPPRKGLEWLGVIWGSETTYYNSALKSRLTIIK | | |
| domain; CD3 zeta | | DNSKSQVFLKMNSLQTDDTAIYYCAKHYYYGGSY | | |
| signaling domain; | | AMDYWGQGTSVTVSSTTTPAPRPPTPAPTIASQPLS | | |
| Linker (GS); P2A | | LRPEACRPAAGGAVHTRGLDFACDIYIWAPLAGTC | | |
| cleavage site; | | GVLLLSLVITLYCKRGRKKLLYIFKQPFMRPVQTTQ | | |
| IL12B (p40) | | EEDGCSCRFPEEEEGGCELRVKFSRSADAPAYKQG | | |
| signal sequence; | | QNQLYNELNLGRREEYDVLDKRRGRDPEMGGKPR | | |
| IL12B (p40) | | RKNPQEGLYNELQKDKMAEAYSEIGMKGERRRGK | | |
| (23-328 of WT); | | GHDGLYQGLSTATKDTYDALHMQALPPRGSATNF | | |
| Linker ((G4S)3; | | SLLKQAGDVEENPGPMCHQQLVISWFSLVFLASPL | | |
| IL12A (p35) | | VAIWELKKDVYVVELDWYPDAPGEMVVLTCDTPE | | |
| (57-253 of WT); | | EDGITWTLDQSSEVLGSGKTLTIQVKEFGDAGQYT | | |
| Linker (GS); ER | | CHKGGEVLSHSLLLLHKKEDGIWSTDILKDQKEPK | | |
| (aa 305-549 of | | NKTFLRCEAKNYSGRFTCWWLTTISTDLTFSVKSSR | | |
| WT, L384M, | | GSSDPQGVTCGAATLSAERVRGDNKEYEYSVECQE | | |
| M421G, Q502D, | | DSACPAAEESLPIEVMVDAVHKLKYENYTSSFFIRD | | |
| G521R, Y537S); | | IIKPDPPKNLQLKPLKNSRQVEVSWEYPDTWSTPHS | | |
| stop) | | YFSLTFCVQVQGKSKREKKDRVFTDKTSATVICRK | | |
| | | NASISVRAQDRYYSSSWSEWASVPCSGGGGSGGGG | | |
| | | SGGGGSRNLPVATPDPGMFPCLHHSQNLLRAVSNM | | |
| | | LQKARQTLEFYPCTSEEIDHEDITKDKTSTVEACLPL | | |
| | | ELTKNESCLNSRETSFITNGSCLASRKTSFMMALCL | | |
| | | SSIYEDLKMYQVEFKTMNAKLLMDPKRQIFLDQN | | |
| | | MLAVIDELMQALNFNSETVPQKSSLEEPDFYKTKIK | | |
| | | LCILLHAFRIRAVTIDRVMSYLNASGSSLALSLTAD | | |
| | | QMVSALLDAEPPILYSEYDPTRPFSEASMMGLLTNL | | |
| | | ADRELVHMINWAKRVPGFVDLTLHDQVHLLECAW | | |
| | | MEILMIGLVWRSMEHPGKLLFAPNLLLDRNQGKCV | | |
| | | EGGVEIFDMLLATSSRFRMMNLQGEEFVCLKSIILL | | |
| | | NSGVYTFLSSTLKSLEEKDHIHRVLDKITDTLIHLM | | |
| | | AKAGLTLQQQHDRLAQLLLILSHIRHMSNKRMEHL | | |
| | | YSMKCKNVVPLSDLLLEMLDAHRL* | | |
| OT-001653 | Full | MALPVTALLLPLALLLHAARPDIQMTQTTSSLSASL | 377 | 378 |
| (CD8α leader | Construct | GDRVTISCRASQDISKYLNWYQQKPDGTVKLLIYH | | |
| sequence; CD19 | | TSRLHSGVPSRFSGSGSGTDYSLTISNLEQEDIATYF | | |
| scFv; CD8α | | CQQGNTLPYTFGGGTKLEITGGGGSGGGGSGGGGS | | |
| Hinge-TM; 4- | | EVKLQESGPGLVAPSQSLSVTCTVSGVSLPDYGVS | | |
| 1BB signaling | | WIRQPPRKGLEWLGVIWGSETTYYNSALKSRLTIIK | | |
| domain; CD3 zeta | | DNSKSQVFLKMNSLQTDDTAIYYCAKHYYYGGSY | | |
| signaling domain; | | AMDYWGQGTSVTVSSTTTPAPRPPTPAPTIASQPLS | | |
| Linker (GS); P2A | | LRPEACRPAAGGAVHTRGLDFACDIYIWAPLAGTC | | |
| cleavage site; | | GVLLLSLVITLYCKRGRKKLLYIFKQPFMRPVQTTQ | | |
| IL12B (p40) | | EEDGCSCRFPEEEEGGCELRVKFSRSADAPAYKQG | | |
| signal sequence; | | QNQLYNELNLGRREEYDVLDKRRGRDPEMGGKPR | | |
| IL12B (p40) | | RKNPQEGLYNELQKDKMAEAYSEIGMKGERRRGK | | |
| (23-328 of WT); | | GHDGLYQGLSTATKDTYDALHMQALPPRGSATNF | | |
| Linker ((G4S)3; | | SLLKQAGDVEENPGPMCHQQLVISWFSLVFLASPL | | |
| IL12A (p35) | | VAIWELKKDVYVVELDWYPDAPGEMVVLTCDTPE | | |
| (57-253 of WT); | | EDGITWTLDQSSEVLGSGKTLTIQVKEFGDAGQYT | | |
| Linker (GS); ER | | CHKGGEVLSHSLLLLHKKEDGIWSTDILKDQKEPK | | |
| (aa 305-549 of | | NKTFLRCEAKNYSGRFTCWWLTTISTDLTFSVKSSR | | |
| WT, L384M, | | GSSDPQGVTCGAATLSAERVRGDNKEYEYSVECQE | | |
| M421G, Q502R, | | DSACPAAEESLPIEVMVDAVHKLKYENYTSSFFIRD | | |
| G521R, Y537S); | | IIKPDPPKNLQLKPLKNSRQVEVSWEYPDTWSTPHS | | |
| stop) | | YFSLTFCVQVQGKSKREKKDRVFTDKTSATVICRK | | |
| | | NASISVRAQDRYYSSSWSEWASVPCSGGGGSGGGG | | |
| | | SGGGGSRNLPVATPDPGMFPCLHHSQNLLRAVSNM | | |
| | | LQKARQTLEFYPCTSEEIDHEDITKDKTSTVEACLPL | | |
| | | ELTKNESCLNSRETSFITNGSCLASRKTSFMMALCL | | |
| | | SSIYEDLKMYQVEFKTMNAKLLMDPKRQIFLDQN | | |
| | | MLAVIDELMQALNFNSETVPQKSSLEEPDFYKTKIK | | |
| | | LCILLHAFRIRAVTIDRVMSYLNASGSSLALSLTAD | | |
| | | QMVSALLDAEPPILYSEYDPTRPFSEASMMGLLTNL | | |
| | | ADRELVHMINWAKRVPGFVDLTLHDQVHLLECAW | | |
| | | MEILMIGLVWRSMEHPGKLLFAPNLLLDRNQGKCV | | |
| | | EGGVEIFDMLLATSSRFRMMNLQGEEFVCLKSIILL | | |
| | | NSGVYTFLSSTLKSLEEKDHIHRVLDKITDTLIHLM | | |
| | | AKAGLTLQQQHRRLAQLLLILSHIRHMSNKRMEHL | | |
| | | YSMKCKNVVPLSDLLLEMLDAHRL* | | |
| OT-001356 (Full | Full | — | — | 379 |
| Construct: CD8a | Construct | | | |
| leader; CD19 | Encoded | MALPVTALLLPLALLLHAARPDIQMTQTTSSLSASL | 380 | 381 |
| scFv; CD8a Hinge | Protein 1 | GDRVTISCRASQDISKYLNWYQQKPDGTVKLLIYH | | |
| and | | TSRLHSGVPSRFSGSGSGTDYSLTISNLEQEDIATYF | | |
| Transmembrane | | CQQGNTLPYTFGGGTKLEITGGGGSGGGGSGGGGS | | |
| Domain; 4-1BB | | EVKLQESGPGLVAPSQSLSVTCTVSGVSLPDYGVS | | |
| intracellular | | WIRQPPRKGLEWLGVIWGSETTYYNSALKSRLTIIK | | |
| domain; CD3 zeta | | DNSKSQVFLKMNSLQTDDTAIYYCAKHYYYGGSY | | |
| signaling domain; | | AMDYWGQGTSVTVSSTTTPAPRPPTPAPTIASQPLS | | |
| stop; spacer; | | LRPEACRPAAGGAVHTRGLDFACDIYIWAPLAGTC | | |
| IRES; spacer; p40 | | GVLLLSLVITLYCKRGRKKLLYIFKQPFMRPVQTTQ | | |
| signal sequence; | | EEDGCSCRFPEEEEGGCELRVKFSRSADAPAYKQG | | |
| p40 (23-328 of | | QNQLYNELNLGRREEYDVLDKRRGRDPEMGGKPR | | |
| WT); Linker | | RKNPQEGLYNELQKDKMAEAYSEIGMKGERRRGK | | |
| ((G4S)3); p35 | | GHDGLYQGLSTATKDTYDALHMQALPPR* | | |
| (57-253 of WT); | Encoded | MCHQQLVISWFSLVFLASPLVAIWELKKDVYVVEL | 382 | 383 |
| BamHI (GS); | Protein 2 | DWYPDAPGEMVVLTCDTPEEDGITWTLDQSSEVLG | | |
| stop) (Encoded | | SGKTLTIQVKEFGDAGQYTCHKGGEVLSHSLLLLH | | |
| Protein 1: CD8a | | KKEDGIWSTDILKDQKEPKNKTFLRCEAKNYSGRF | | |
| leader; CD19 | | TCWWLTTISTDLTFSVKSSRGSSDPQGVTCGAATLS | | |
| scFv; CD8a Hinge | | AERVRGDNKEYEYSVECQEDSACPAAEESLPIEVM | | |
| and | | VDAVHKLKYENYTSSHFFIRDIIKPDPPKNLQLKPLK | | |
| Transmembrane | | NSRQVEVSWEYPDTWSTPHSYFSLTFCVQVQGKSK | | |
| Domain; 4-1BB | | REKKDRVFTDKTSATVICRKNASISVRAQDRYYSSS | | |
| intracellular | | WSEWASVPCSGGGGSGGGGSGGGGSRNLPVATPD | | |
| domain; CD3 zeta | | PGMFPCLHHSQNLLRAVSNMLQKARQTLEFYPCTS | | |
| signaling domain; | | EEIDHEDITKDKTSTVEACLPLELTKNESCLNSRETS | | |
| stop) (Encoded | | FITNGSCLASRKTSFMMALCLSSIYEDLKMYQVEFK | | |
| Protein 2: p40 | | TMNAKLLMDPKRQIFLDQNMLAVIDELMQALNFN | | |
| signal sequence; | | SETVPQKSSLEEPDFYKTKIKLCILLHAFRIRAVTIDR | | |
| p40 (23-328 of | | VMSYLNASGS* | | |
| WT); Linker | | | | |
| ((G4S)3); p35 | | | | |
| (57-253 of WT); | | | | |
| BamHI (GS); | | | | |
| stop) | | | | |
| OT-001357 | Full | MALPVTALLLPLALLLHAARPDIQMTQTTSSLSASL | 384 | 385 |
| (CD8a leader; | Construct | GDRVTISCRASQDISKYLNWYQQKPDGTVKLLIYH | | |
| CD19 scFv; CD8a | | TSRLHSGVPSRFSGSGSGTDYSLTISNLEQEDIATYF | | |
| Hinge and | | CQQGNTLPYTFGGGTKLEITGGGGSGGGGSGGGGS | | |
| Transmembrane | | EVKLQESGPGLVAPSQSLSVTCTVSGVSLPDYGVS | | |
| Domain; 4-1BB | | WIRQPPRKGLEWLGVIWGSETTYYNSALKSRLTIIK | | |
| intracellular | | DNSKSQVFLKMNSLQTDDTAIYYCAKHYYYGGSY | | |
| domain; CD3 zeta | | AMDYWGQGTSVTVSSTTTPAPRPPTPAPTIASQPLS | | |
| signaling domain; | | LRPEACRPAAGGAVHTRGLDFACDIYIWAPLAGTC | | |
| BamHI (GS); P2A | | GVLLLSLVITLYCKRGRKKLLYIFKQPFMRPVQTTQ | | |
| Cleavage Site; | | EEDGCSCRFPEEEEGGCELRVKFSRSADAPAYKQG | | |
| p40 signal | | QNQLYNELNLGRREEYDVLDKRRGRDPEMGGKPR | | |
| sequence; p40 | | RKNPQEGLYNELQKDKMAEAYSEIGMKGERRRGK | | |
| (23-328 of WT); | | GHDGLYQGLSTATKDTYDALHMQALPPRGSATNF | | |
| Linker ((G4S)3); | | SLLKQAGDVEENPGPMCHQQLVISWFSLVFLASPL | | |
| p35 (57-253 of | | VAIWELKKDVYVVELDWYPDAPGEMVVLTCDTPE | | |
| WT); BamHI | | EDGITWTLDQSSEVLGSGKTLTIQVKEFGDAGQYT | | |
| (GS); stop)) | | CHKGGEVLSHSLLLLHKKEDGIWSTDILKDQKEPK | | |
| | | NKTFLRCEAKNYSGRFTCWWLTTISTDLTFSVKSSR | | |
| | | GSSDPQGVTCGAATLSAERVRGDNKEYEYSVECQE | | |
| | | DSACPAAEESLPIEVMVDAVHKLKYENYTSSFFIRD | | |
| | | IIKPDPPKNLQLKPLKNSRQVEVSWEYPDTWSTPHS | | |
| | | YFSLTFCVQVQGKSKREKKDRVFTDKTSATVICRK | | |
| | | NASISVRAQDRYYSSSWSEWASVPCSGGGGSGGGG | | |
| | | SGGGGSRNLPVATPDPGMFPCLHHSQNLLRAVSNM | | |
| | | LQKARQTLEFYPCTSEEIDHEDITKDKTSTVEACLPL | | |
| | | ELTKNESCLNSRETSFITNGSCLASRKTSFMMALCL | | |
| | | SSIYEDLKMYQVEFKTMNAKLLMDPKRQIFLDQN | | |
| | | MLAVIDELMQALNFNSETVPQKSSLEEPDFYKTKIK | | |
| | | LCILLHAFRIRAVTIDRVMSYLNASGS* | | |

TABLE 6
CD19-CAR Constructs

| | | AA | NA |
|---|---|---|---|
| | | SEQ | SEQ |
| Construct ID | AA sequence | ID NO. | ID NO. |
| OT-001407 (CD8a | MALPVTALLLPLALLLHAARPDIQMTQTTSSLSASLGDRVTIS | 386 | 387 |
| leader; CD19 | CRASQDISKYLNWYQQKPDGTVKLLIYHTSRLHSGVPSRFSG | | |
| scFV; CD8a-Tm; | SGSGTDYSLTISNLEQEDIATYFCQQGNTLPYTFGGGTKLEIT | | |
| 41BB ; CD3 zeta; | GGGGSGGGGSGGGGSEVKLQESGPGLVAPSQSLSVTCTVSG | | |
| stop) | VSLPDYGVSWIRQPPRKGLEWLGVIWGSETTYYNSALKSRLT | | |
| | IIKDNSKSQVFLKMNSLQTDDTAIYYCAKHYYYGGSYAMDY | | |
| | WGQGTSVTVSSTTTPAPRPPTPAPTIASQPLSLRPEACRPAAG | | |
| | GAVHTRGLDFACDIYIWAPLAGTCGVLLLSLVITLYCKRGRK | | |
| | KLLYIFKQPFMRPVQTTQEEDGCSCRFPEEEEGGCELRVKFSR | | |
| | SADAPAYKQGQNQLYNELNLGRREEYDVLDKRRGRDPEMG | | |
| | GKPRRKNPQEGLYNELQKDKMAEAYSEIGMKGERRRGKGH | | |
| | DGLYQGLSTATKDTYDALHMQALPPR* | | |
| OT-001790 (CD8α | MALPVTALLLPLALLLHAARPDIQMTQTTSSLSASLGDRVTIS | 388 | 389 |
| leader sequence; | CRASQDISKYLNWYQQKPDGTVKLLIYHTSRLHSGVPSRFSG | | |
| CD19 scFv; CD8α | SGSGTDYSLTISNLEQEDIATYFCQQGNTLPYTFGGGTKLEIT | | |
| Hinge-TM; 4-1BB | GGGGSGGGGSGGGGSEVKLQESGPGLVAPSQSLSVTCTVSG | | |
| signaling domain; | VSLPDYGVSWIRQPPRKGLEWLGVIWGSETTYYNSALKSRLT | | |
| CD3 zeta signaling | IIKDNSKSQVFLKMNSLQTDDTAIYYCAKHYYYGGSYAMDY | | |
| domain; Linker | WGQGTSVTVSSTTTPAPRPPTPAPTIASQPLSLRPEACRPAAG | | |
| (GS); ER (aa | GAVHTRGLDFACDIYIWAPLAGTCGVLLLSLVITLYCKRGRK | | |
| 305-549 of WT, | KLLYIFKQPFMRPVQTTQEEDGCSCRFPEEEEGGCELRVKFSR | | |
| R335G, L384M, | SADAPAYKQGQNQLYNELNLGRREEYDVLDKRRGRDPEMG | | |
| M421G, G521R, | GKPRRKNPQEGLYNELQKDKMAEAYSEIGMKGERRRGKGH | | |
| E523G, Y537S, | DGLYQGLSTATKDTYDALHMQALPPRGSSLALSLTADQMVS | | |
| A546T); stop) | ALLDAEPPILYSEYDPTGPFSEASMMGLLTNLADRELVHMIN | | |
| | WAKRVPGFVDLTLHDQVHLLECAWMEILMIGLVWRSMEHP | | |
| | GKLLFAPNLLLDRNQGKCVEGGVEIHMLLATSSRFRMMNL | | |
| | QGEEFVCLKSIILLNSGVYTFLSSTLKSLEEKDHIHRVLDKITD | | |
| | TLIHLMAKAGLTLQQQHQRLAQLLLILSHIRHMSNKRMGHL | | |
| | YSMKCKNVVPLSDLLLEMLDTHRL* | | |
| OT-001789 (CD8α | MALPVTALLLPLALLLHAARPDIQMTQTTSSLSASLGDRVTIS | 390 | 391 |
| leader sequence; | CRASQDISKYLNWYQQKPDGTVKLLIYHTSRLHSGVPSRFSG | | |
| CD19 scFv; CD8α | SGSGTDYSLTISNLEQEDIATYFCQQGNTLPYTFGGGTKLEIT | | |
| Hinge-TM; 4-1BB | GGGGSGGGGSGGGGSEVKLQESGPGLVAPSQSLSVTCTVSG | | |
| signaling domain; | VSLPDYGVSWIRQPPRKGLEWLGVIWGSETTYYNSALKSRLT | | |
| CD3 zeta signaling | IIKDNSKSQVFLKMNSLQTDDTAIYYCAKHYYYGGSYAMDY | | |
| domain; Linker | WGQGTSVTVSSTTTPAPRPPTPAPTIASQPLSLRPEACRPAAG | | |
| (GS); ER (aa | GAVHTRGLDFACDIYIWAPLAGTCGVLLLSLVITLYCKRGRK | | |
| 305-549 of WT, | KLLYIFKQPFMRPVQTTQEEDGCSCRFPEEEEGGCELRVKFSR | | |
| L384M; M421G; | SADAPAYKQGQNQLYNELNLGRREEYDVLDKRRGRDPEMG | | |
| T431I; G521R, | GKPRRKNPQEGLYNELQKDKMAEAYSEIGMKGERRRGKGH | | |
| Y537S) ; stop) | DGLYQGLSTATKDTYDALHMQALPPRGSSLALSLTADQMVS | | |
| | ALLDAEPPILYSEYDPTRPFSEASMMGLLTNLADRELVHMIN | | |
| | WAKRVPGFVDLTLHDQVHLLECAWMEILMIGLVWRSMEHP | | |
| | GKLLFAPNLLLDRNQGKCVEGGVEIHMLLAISSRFRMMNL | | |
| | QGEEFVCLKSIILLNSGVYTFLSSTLKSLEEKDHIHRVLDKITD | | |
| | TLIHLMAKAGLTLQQQHQRLAQLLLILSHIRHMSNKRMEHL | | |
| | YSMKCKNVVPLSDLLLEMLDAHRL* | | |
| OT-001788 (CD8α | MALPVTALLLPLALLLHAARPDIQMTQTTSSLSASLGDRVTIS | 392 | 393 |
| leader sequence; | CRASQDISKYLNWYQQKPDGTVKLLIYHTSRLHSGVPSRFSG | | |
| CD19 scFv; CD8α | SGSGTDYSLTISNLEQEDIATYFCQQGNTLPYTFGGGTKLEIT | | |
| Hinge-TM; 4-1BB | GGGGSGGGGSGGGGSEVKLQESGPGLVAPSQSLSVTCTVSG | | |
| signaling domain; | VSLPDYGVSWIRQPPRKGLEWLGVIWGSETTYYNSALKSRLT | | |
| CD3 zeta signaling | IIKDNSKSQVFLKMNSLQTDDTAIYYCAKHYYYGGSYAMDY | | |
| domain; Linker | WGQGTSVTVSSTTTPAPRPPTPAPTIASQPLSLRPEACRPAAG | | |
| (GS); ER (aa | GAVHTRGLDFACDIYIWAPLAGTCGVLLLSLVITLYCKRGRK | | |
| 305-549 of WT, | KLLYIFKQPFMRPVQTTQEEDGCSCRFPEEEEGGCELRVKFSR | | |
| L384M, N413D, | SADAPAYKQGQNQLYNELNLGRREEYDVLDKRRGRDPEMG | | |
| M421G, G521R, | GKPRRKNPQEGLYNELQKDKMAEAYSEIGMKGERRRGKGH | | |
| Y537S); stop) | DGLYQGLSTATKDTYDALHMQALPPRGSSLALSLTADQMVS | | |
| | ALLDAEPPILYSEYDPTRPFSEASMMGLLTNLADRELVHMIN | | |
| | WAKRVPGFVDLTLHDQVHLLECAWMEILMIGLVWRSMEHP | | |
| | GKLLFAPNLLLDRDQGKCVEGGVEIFDMLLATSSRFRMMNL | | |
| | QGEEFVCLKSIILLNSGVYTFLSSTLKSLEEKDHIHRVLDKITD | | |
| | TLIHLMAKAGLTLQQQHQRLAQLLLILSHIRHMSNKRMEHL | | |
| | YSMKCKNVVPLSDLLLEMLDAHRL* | | |
| OT-001787 (CD8α | MALPVTALLLPLALLLHAARPDIQMTQTTSSLSASLGDRVTIS | 394 | 395 |
| leader sequence; | CRASQDISKYLNWYQQKPDGTVKLLIYHTSRLHSGVPSRFSG | | |
| CD19 scFv; CD8α | SGSGTDYSLTISNLEQEDIATYFCQQGNTLPYTFGGGTKLEIT | | |
| Hinge-TM; 4-1BB | GGGGSGGGGSGGGGSEVKLQESGPGLVAPSQSLSVTCTVSG | | |
| signaling domain; | VSLPDYGVSWIRQPPRKGLEWLGVIWGSETTYYNSALKSRLT | | |
| CD3 zeta signaling | IIKDNSKSQVFLKMNSLQTDDTAIYYCAKHYYYGGSYAMDY | | |
| domain; Linker | WGQGTSVTVSSTTTPAPRPPTPAPTIASQPLSLRPEACRPAAG | | |
| (GS); ER (aa | GAVHTRGLDFACDIYIWAPLAGTCGVLLLSLVITLYCKRGRK | | |
| 305-549 of WT, | KLLYIFKQPFMRPVQTTQEEDGCSCRFPEEEEGGCELRVKFSR | | |
| L384M, M421G, | SADAPAYKQGQNQLYNELNLGRREEYDVLDKRRGRDPEMG | | |
| N519S, G521R, | GKPRRKNPQEGLYNELQKDKMAEAYSEIGMKGERRRGKGH | | |
| Y537S); stop) | DGLYQGLSTATKDTYDALHMQALPPRGSSLALSLTADQMVS | | |
| | ALLDAEPPILYSEYDPTRPFSEASMMGLLTNLADRELVHMIN | | |
| | WAKRVPGFVDLTLHDQVHLLECAWMEILMIGLVWRSMEHP | | |
| | GKLLFAPNLLLDRNQGKCVEGGVEIFDMLLATSSRFRMMNL | | |
| | QGEEFVCLKSIILLNSGVYTFLSSTLKSLEEKDHIHRVLDKITD | | |
| | TLIHLMAKAGLTLQQQHQRLAQLLLILSHIRHMSSKRMEHLY | | |
| | SMKCKNVVPLSDLLLEMLDAHRL* | | |
| OT-001786 (CD8α | MALPVTALLLPLALLLHAARPDIQMTQTTSSLSASLGDRVTIS | 396 | 397 |
| leader sequence; | CRASQDISKYLNWYQQKPDGTVKLLIYHTSRLHSGVPSRFSG | | |
| CD19 scFv; CD8α | SGSGTDYSLTISNLEQEDIATYFCQQGNTLPYTFGGGTKLEIT | | |
| Hinge-TM; 4-1BB | GGGGSGGGGSGGGGSEVKLQESGPGLVAPSQSLSVTCTVSG | | |
| signaling domain; | VSLPDYGVSWIRQPPRKGLEWLGVIWGSETTYYNSALKSRLT | | |
| CD3 zeta signaling | IIKDNSKSQVFLKMNSLQTDDTAIYYCAKHYYYGGSYAMDY | | |
| domain; Linker | WGQGTSVTVSSTTTPAPRPPTPAPTIASQPLSLRPEACRPAAG | | |
| (GS); ER (aa | GAVHTRGLDFACDIYIWAPLAGTCGVLLLSLVITLYCKRGRK | | |
| 305-549 of WT, | KLLYIFKQPFMRPVQTTQEEDGCSCRFPEEEEGGCELRVKFSR | | |
| L384M, M421G, | SADAPAYKQGQNQLYNELNLGRREEYDVLDKRRGRDPEMG | | |
| Q502R, G521R, | GKPRRKNPQEGLYNELQKDKMAEAYSEIGMKGERRRGKGH | | |
| Y537S); stop) | DGLYQGLSTATKDTYDALHMQALPPRGSSLALSLTADQMVS | | |
| | ALLDAEPPILYSEYDPTRPFSEASMMGLLTNLADRELVHMIN | | |
| | WAKRVPGFVDLTLHDQVHLLECAWMEILMIGLVWRSMEHP | | |
| | GKLLFAPNLLLDRNQGKCVEGGVEIFDMLLATSSRFRMMNL | | |
| | QGEEFVCLKSIILLNSGVYTFLSSTLKSLEEKDHIHRVLDKITD | | |
| | TLIHLMAKAGLTLQQQHRRLAQLLLILSHIRHMSNKRMEHL | | |
| | YSMKCKNVVPLSDLLLEMLDAHRL* | | |
| OT-001785 (CD8α | MALPVTALLLPLALLLHAARPDIQMTQTTSSLSASLGDRVTIS | 398 | 399 |
| leader sequence; | CRASQDISKYLNWYQQKPDGTVKLLIYHTSRLHSGVPSRFSG | | |
| CD19 scFv; CD8α | SGSGTDYSLTISNLEQEDIATYFCQQGNTLPYTFGGGTKLEIT | | |
| Hinge-TM; 4-1BB | GGGGSGGGGSGGGGSEVKLQESGPGLVAPSQSLSVTCTVSG | | |
| signaling domain; | VSLPDYGVSWIRQPPRKGLEWLGVIWGSETTYYNSALKSRLT | | |
| CD3 zeta signaling | IIKDNSKSQVFLKMNSLQTDDTAIYYCAKHYYYGGSYAMDY | | |
| domain; Linker | WGQGTSVTVSSTTTPAPRPPTPAPTIASQPLSLRPEACRPAAG | | |
| (GS); ER (aa | GAVHTRGLDFACDIYIWAPLAGTCGVLLLSLVITLYCKRGRK | | |
| 305-549 of WT, | KLLYIFKQPFMRPVQTTQEEDGCSCRFPEEEEGGCELRVKFSR | | |
| T371A, L384M, | SADAPAYKQGQNQLYNELNLGRREEYDVLDKRRGRDPEMG | | |
| M421G, N519S, | GKPRRKNPQEGLYNELQKDKMAEAYSEIGMKGERRRGKGH | | |
| G521R, Y537S); | DGLYQGLSTATKDTYDALHMQALPPRGSSLALSLTADQMVS | | |
| stop) | ALLDAEPPILYSEYDPTRPFSEASMMGLLTNLADRELVHMIN | | |
| | WAKRVPGFVDLALHDQVHLLECAWMEILMIGLVWRSMEHP | | |
| | GKLLFAPNLLLDRNQGKCVEGGVEIFDMLLATSSRFRMMNL | | |
| | QGEEFVCLKSIILLNSGVYTFLSSTLKSLEEKDHIHRVLDKITD | | |
| | TLIHLMAKAGLTLQQQHQRLAQLLLILSHIRHMSSKRMEHLY | | |
| | SMKCKNVVPLSDLLLEMLDAHRL* | | |
| OT-001784 (CD8α | MALPVTALLLPLALLLHAARPDIQMTQTTSSLSASLGDRVTIS | 400 | 401 |
| leader sequence; | CRASQDISKYLNWYQQKPDGTVKLLIYHTSRLHSGVPSRFSG | | |
| CD19 scFv; CD8α | SGSGTDYSLTISNLEQEDIATYFCQQGNTLPYTFGGGTKLEIT | | |
| Hinge-TM; 4-1BB | GGGGSGGGGSGGGGSEVKLQESGPGLVAPSQSLSVTCTVSG | | |
| signaling domain; | VSLPDYGVSWIRQPPRKGLEWLGVIWGSETTYYNSALKSRLT | | |
| CD3 zeta signaling | IIKDNSKSQVFLKMNSLQTDDTAIYYCAKHYYYGGSYAMDY | | |
| domain; Linker | WGQGTSVTVSSTTTPAPRPPTPAPTIASQPLSLRPEACRPAAG | | |
| (GS); ER (aa | GAVHTRGLDFACDIYIWAPLAGTCGVLLLSLVITLYCKRGRK | | |
| 305-549 of WT, | KLLYIFKQPFMRPVQTTQEEDGCSCRFPEEEEGGCELRVKFSR | | |
| S305N, L384M, | SADAPAYKQGQNQLYNELNLGRREEYDVLDKRRGRDPEMG | | |
| M421G, G442V, | GKPRRKNPQEGLYNELQKDKMAEAYSEIGMKGERRRGKGH | | |
| G521R, Y537S); | DGLYQGLSTATKDTYDALHMQALPPRGSNLALSLTADQMV | | |
| stop) | SALLDAEPPILYSEYDPTRPFSEASMMGLLTNLADRELVHMI | | |
| | NWAKRVPGFVDLTLHDQVHLLECAWMEILMIGLVWRSMEH | | |
| | PGKLLFAPNLLLDRNQGKCVEGGVEIFDMLLATSSRFRMMN | | |
| | LQVEEFVCLKSIILLNSGVYTFLSSTLKSLEEKDHIHRVLDKIT | | |
| | DTLIHLMAKAGLTLQQQHQRLAQLLLILSHIRHMSNKRMEH | | |
| | LYSMKCKNVVPLSDLLLEMLDAHRL* | | |
| OT-001793 (CD8α | MALPVTALLLPLALLLHAARPSLALSLTADQMVSALLDAEPP | 402 | 403 |
| leader sequence; | ILYSEYDPTRPFSEASMMGLLTNLADRELVHMINWAKRVPG | | |
| ER (aa 305-549 of | FVDLALHDQVHLLECAWMEILMIGLVWRSMEHPGKLLFAPN | | |
| WT, T371A, | LLLDRNQGKCVEGGVEIFDMLLATSSRFRMMNLQGEEFVCL | | |
| L384M, M421G, | KSIILLNSGVYTFLSSTLKSLEEKDHIHRVLDKITDTLIHLMAK | | |
| N519S, G521R, | AGLTLQQQHQRLAQLLLILSHIRHMSSKRMEHLYSMKCKNV | | |
| Y537S); Linker | VPLSDLLLEMLDAHRLGSDIQMTQTTSSLSASLGDRVTISCRA | | |
| (GS); CD19 scFv; | SQDISKYLNWYQQKPDGTVKLLIYHTSRLHSGVPSRFSGSGS | | |
| CD8α Hinge-TM; | GTDYSLTISNLEQEDIATYFCQQGNTLPYTFGGGTKLEITGGG | | |
| 4-1BB signaling | GSGGGGSGGGGSEVKLQESGPGLVAPSQSLSVTCTVSGVSLP | | |
| domain; CD3 zeta | DYGVSWIRQPPRKGLEWLGVIWGSETTYYNSALKSRLTIIKD | | |
| signaling domain; | NSKSQVFLKMNSLQTDDTAIYYCAKHYYYGGSYAMDYWG | | |
| stop) | QGTSVTVSSTTTPAPRPPTPAPTIASQPLSLRPEACRPAAGGA | | |
| | VHTRGLDFACDIYIWAPLAGTCGVLLLSLVITLYCKRGRKKL | | |
| | LYIFKQPFMRPVQTTQEEDGCSCRFPEEEEGGCELRVKFSRSA | | |
| | DAPAYKQGQNQLYNELNLGRREEYDVLDKRRGRDPEMGGK | | |
| | PRRKNPQEGLYNELQKDKMAEAYSEIGMKGERRRGKGHDG | | |
| | LYQGLSTATKDTYDALHMQALPPR* | | |
| OT-001791 (CD8α | MALPVTALLLPLALLLHAARPRSSLALSLTADQMVSALLDAE | 404 | 405 |
| leader sequence; | PPILYSEYDPTRPFSEASMMGLLTNLADRELVHMINWAKRVP | | |
| Linker (RS); ER | GFVDLALHDQVHLLECAWMEILMIGLVWRSMEHPGKLLFAP | | |
| (aa 305-549 of | NLLLDRNQGKCVEGGVEIFDMLLATSSRFRMMNLQGEEFVC | | |
| WT, T371A, | LKSIILLNSGVYTFLSSTLKSLEEKDHIHRVLDKITDTLIHLMA | | |
| L384M, M421G, | KAGLTLQQQHQRLAQLLLILSHIRHMSSKRMEHLYSMKCKN | | |
| N519S, G521R, | VVPLSDLLLEMLDAHRLGTGAEDPRPSRKRRSLGDVGEIVM | | |
| Y537S); Furin | TQSPATLSLSPGERATLSCRASQDISKYLNWYQQKPGQAPRL | | |
| cleavage site; | LIYHTSRLHSGIPARFSGSGSGTDYTLTISSLQPEDFAVYFCQQ | | |
| CD19 scFv; CD8α | GNTLPYTFGQGTKLEIKGGGGSGGGGSGGGGSQVQLQESGP | | |
| Hinge-TM; 4-1BB | GLVKPSETLSLTCTVSGVSLPDYGVSWIRQPPGKGLEWIGVI | | |
| signaling domain; | WGSETTYYSSSLKSRVTISKDNSKNQVSLKLSSVTAADTAVY | | |
| CD3 zeta signaling | YCAKHYYYGGSYAMDYWGQGTLVTVSSTTTPAPRPPTPAPT | | |
| domain; stop) | IASQPLSLRPEACRPAAGGAVHTRGLDFACDIYIWAPLAGTC | | |
| | GVLLLSLVITLYCKRGRKKLLYIFKQPFMRPVQTTQEEDGCS | | |
| | CRFPEEEEGGCELRVKFSRSADAPAYKQGQNQLYNELNLGR | | |
| | REEYDVLDKRRGRDPEMGGKPRRKNPQEGLYNELQKDKMA | | |
| | EAYSEIGMKGERRRGKGHDGLYQGLSTATKDTYDALHMQA | | |
| | LPPR* | | |
| OT-001792 (CD8α | MALPVTALLLPLALLLHAARPRSSLALSLTADQMVSALLDAE | 406 | 407 |
| leader sequence; | PPILYSEYDPTRPFSEASMMGLLTNLADRELVHMINWAKRVP | | |
| Linker (RS); ER | GFVDLTLHDQVHLLECAWMEILMIGLVWRSMEHPGKLLFAP | | |
| (aa 305-549 of | NLLLDRNQGKCVEGGVEIFDMLLATSSRFRMMNLQGEEFVC | | |
| WT, L384M, | LKSIILLNSGVYTFLSSTLKSLEEKDHIHRVLDKITDTLIHLMA | | |
| M421G, G521R, | KAGLTLQQQHQRLAQLLLILSHIRHMSNKRMEHLYSMKCKN | | |
| Y537S); Furin | VVPLSDLLLEMLDAHRLGTGAEDPRPSRKRRSLGDVGEIVM | | |
| cleavage site; | TQSPATLSLSPGERATLSCRASQDISKYLNWYQQKPGQAPRL | | |
| CD19 scFv; CD8α | LIYHTSRLHSGIPARFSGSGSGTDYTLTISSLQPEDFAVYFCQQ | | |
| Hinge-TM; 4-1BB | GNTLPYTFGQGTKLEIKGGGGSGGGGSGGGGSQVQLQESGP | | |
| signaling domain; | GLVKPSETLSLTCTVSGVSLPDYGVSWIRQPPGKGLEWIGVI | | |
| CD3 zeta signaling | WGSETTYYSSSLKSRVTISKDNSKNQVSLKLSSVTAADTAVY | | |
| domain; stop) | YCAKHYYYGGSYAMDYWGQGTLVTVSSTTTPAPRPPTPAPT | | |
| | IASQPLSLRPEACRPAAGGAVHTRGLDFACDIYIWAPLAGTC | | |
| | GVLLLSLVITLYCKRGRKKLLYIFKQPFMRPVQTTQEEDGCS | | |
| | CRFPEEEEGGCELRVKFSRSADAPAYKQGQNQLYNELNLGR | | |
| | REEYDVLDKRRGRDPEMGGKPRRKNPQEGLYNELQKDKMA | | |
| | EAYSEIGMKGERRRGKGHDGLYQGLSTATKDTYDALHMQA | | |
| | LPPR* | | |
| OT-002157 (Met; | MALPVTALLLPLALLLHAARPGSSLALSLTADQMVSALLDA | 410 | 411 |
| CD8α leader; | EPPILYSEYDPTRPFSEASMMGLLTNLADRELVHMINWAKRV | | |
| Linker (GS); ER | PGFVDLTLHDQVHLLECAWMEILMIGLVWRSMEHPGKLLFA | | |
| (aa 305-549 of | PNLLLDRNQGKCVEGGVEIFDMLLATSSRFRMMNLQGEEFV | | |
| WT, L384M, | CLKSIILLNSGVYTFLSSTLKSLEEKDHIHRVLDKITDTLIHLM | | |
| M421G, N519S, | AKAGLTLQQQHQRLAQLLLILSHIRHMSSKRMEHLYSMKCK | | |
| G521R, Y537S); | NVVPLSDLLLEMLDAHRLGSESRRVRRNKRSKDIQMTQTTSS | | |
| Linker (GS); | LSASLGDRVTISCRASQDISKYLNWYQQKPDGTVKLLIYHTS | | |
| Modified Furin; | RLHSGVPSRFSGSGSGTDYSLTISNLEQEDIATYFCQQGNTLP | | |
| CD19 scFv; CD8a | YTFGGGTKLEITGGGGSGGGGSGGGGSEVKLQESGPGLVAPS | | |
| Hinge and | QSLSVTCTVSGVSLPDYGVSWIRQPPRKGLEWLGVIWGSETT | | |
| Transmembrane | YYNSALKSRLTIIKDNSKSQVFLKMNSLQTDDTAIYYCAKHY | | |
| Domain; CD28 co- | YYGGSYAMDYWGQGTSVTVSSTTTPAPRPPTPAPTIASQPLS | | |
| stimulatory | LRPEACRPAAGGAVHTRGLDFACDIYIWAPLAGTCGVLLLSL | | |
| domain/4-1BB | VITLYCKRGRKKLLYIFKQPFMRPVQTTQEEDGCSCRFPEEEE | | |
| intracellular | GGCELRVKFSRSADAPAYKQGQNQLYNELNLGRREEYDVL | | |
| domain; CD3 zeta | DKRRGRDPEMGGKPRRKNPQEGLYNELQKDKMAEAYSEIG | | |
| intracellular | [sequence omitted] | | |
| domain; stop) | | | |
| OT-002158 (Met; | MALPVTALLLPLALLLHAARPGSSLALSLTADQMVSALLDA | 412 | 413 |
| CD8α leader; | EPPILYSEYDPTRPFSEASMMGLLTNLADRELVHMINWAKRV | | |
| Linker (GS); ER | PGFVDLTLHDQVHLLECAWMEILMIGLVWRSMEHPGKLLFA | | |
| (aa 305-549 of | PNLLLDRNQGKCVEGGVEIFDMLLATSSRFRMMNLQGEEFV | | |
| WT, L384M, | CLKSIILLNSGVYTFLSSTLKSLEEKDHIHRVLDKITDTLIHLM | | |
| M421G, Q502R, | AKAGLTLQQQHRRLAQLLLILSHIRHMSNKRMEHLYSMKCK | | |
| G521R, Y537S); | NVVPLSDLLLEMLDAHRLGSESRRVRRNKRSKDIQMTQTTSS | | |
| Linker (GS); | LSASLGDRVTISCRASQDISKYLNWYQQKPDGTVKLLIYHTS | | |
| Modified Furin; | RLHSGVPSRFSGSGSGTDYSLTISNLEQEDIATYFCQQGNTLP | | |
| CD19 scFv; CD8a | YTFGGGTKLEITGGGGSGGGGSGGGGSEVKLQESGPGLVAPS | | |
| Hinge and | QSLSVTCTVSGVSLPDYGVSWIRQPPRKGLEWLGVIWGSETT | | |
| Transmembrane | YYNSALKSRLTIIKDNSKSQVFLKMNSLQTDDTAIYYCAKHY | | |
| Domain; CD28 co- | YYGGSYAMDYWGQGTSVTVSSTTTPAPRPPTPAPTIASQPLS | | |
| stimulatory | LRPEACRPAAGGAVHTRGLDFACDIYIWAPLAGTCGVLLLSL | | |
| domain/4-1BB | VITLYCKRGRKKLLYIFKQPFMRPVQTTQEEDGCSCRFPEEEE | | |
| intracellular | GGCELRVKFSRSADAPAYKQGQNQLYNELNLGRREEYDVL | | |
| domain; CD3 zeta | DKRRGRDPEMGGKPRRKNPQEGLYNELQKDKMAEAYSEIG | | |
| intracellular | [sequence omitted] | | |
| domain; stop) | | | |
| OT-002159 (Met; | MALPVTALLLPLALLLHAARPGSSLALSLTADQMVSALLDA | 414 | 415 |
| CD8α leader; | EPPILYSEYDPTGPFSEASMMGLLTNLADRELVHMINWAKRV | | |
| Linker (GS); | ERPGFVDLTLHDQVHLLECAWMEILMIGLVWRSMEHPGKLLFA | | |
| (aa 305-549 of | PNLLLDRNQGKCVEGGVEIFDMLLATSSRFRMMNLQGEEFV | | |
| WT, R335G, | CLKSIILLNSGVYTFLSSTLKSLEEKDHIHRVLDKITDTLIHLM | | |
| L384M, M421G, | AKAGLTLQQQHQRLAQLLLILSHIRHMSNKRMGHLYSMKCK | | |
| G521R, E523G, | NVVPLSDLLLEMLDTHRLGSESRRVRRNKRSKDIQMTQTTSS | | |
| Y537S, A546T); | LSASLGDRVTISCRASQDISKYLNWYQQKPDGTVKLLIYHTS | | |
| Linker (GS); | RLHSGVPSRFSGSGSGTDYSLTISNLEQEDIATYFCQQGNTLP | | |
| Modified Furin; | YTFGGGTKLEITGGGGSGGGGSGGGGSEVKLQESGPGLVAPS | | |
| CD19 scFv; CD8a | QSLSVTCTVSGVSLPDYGVSWIRQPPRKGLEWLGVIWGSETT | | |
| Hinge and | YYNSALKSRLTIIKDNSKSQVFLKMNSLQTDDTAIYYCAKHY | | |
| Transmembrane | YYGGSYAMDYWGQGTSVTVSSTTTPAPRPPTPAPTIASQPLS | | |
| Domain; CD28 co- | LRPEACRPAAGGAVHTRGLDFACDIYIWAPLAGTCGVLLLSL | | |
| stimulatory | VITLYCKRGRKKLLYIFKQPFMRPVQTTQEEDGCSCRFPEEEE | | |
| domain/4-1BB | GGCELRVKFSRSADAPAYKQGQNQLYNELNLGRREEYDVL | | |
| intracellular | DKRRGRDPEMGGKPRRKNPQEGLYNELQKDKMAEAYSEIG | | |
| domain; CD3 zeta | [sequence omitted] | | |
| intracellular | | | |
| domain; stop) | | | |
| OT-002160 (Met; | MALPVTALLLPLALLLHAARPGSSLALSLTADQMVSALLDA | 416 | 417 |
| CD8α leader; | EPPILYSEYDPTRPFSEASMMGLLTNLADRELVHMINWAKRV | | |
| Linker (GS); ER | PGFVDLTLHDQVHLLECAWMEILMIGLVWRSMEHPGKLLFA | | |
| (aa 305-549 of | PNLLLDRNQGKCVEGGVEIFDMLLAISSRFRMMNLQGEEFV | | |
| WT, L384M; | CLKSIILLNSGVYTFLSSTLKSLEEKDHIHRVLDKITDTLIHLM | | |
| M421G; T431I; | AKAGLTLQQQHQRLAQLLLILSHIRHMSNKRMEHLYSMKCK | | |
| G521R, Y537S); | NVVPLSDLLLEMLDAHRLGSESRRVRRNKRSKDIQMTQTTSS | | |
| Linker (GS); | LSASLGDRVTISCRASQDISKYLNWYQQKPDGTVKLLIYHTS | | |
| Modified Furin; | RLHSGVPSRFSGSGSGTDYSLTISNLEQEDIATYFCQQGNTLP | | |
| CD19 scFv; CD8a | YTFGGGTKLEITGGGGSGGGGSGGGGSEVKLQESGPGLVAPS | | |
| Hinge and | QSLSVTCTVSGVSLPDYGVSWIRQPPRKGLEWLGVIWGSETT | | |
| Transmembrane | YYNSALKSRLTIIKDNSKSQVFLKMNSLQTDDTAIYYCAKHY | | |
| Domain; CD28 co- | YYGGSYAMDYWGQGTSVTVSSTTTPAPRPPTPAPTIASQPLS | | |
| stimulatory | LRPEACRPAAGGAVHTRGLDFACDIYIWAPLAGTCGVLLLSL | | |
| domain/4-1BB | VITLYCKRGRKKLLYIFKQPFMRPVQTTQEEDGCSCRFPEEEE | | |
| intracellular | GGCELRVKFSRSADAPAYKQGQNQLYNELNLGRREEYDVL | | |
| domain; CD3 zeta | DKRRGRDPEMGGKPRRKNPQEGLYNELQKDKMAEAYSEIG | | |
| intracellular | [sequence omitted] | | |
| domain; stop) | | | |
| OT-002161 (Met; | MALPVTALLLPLALLLHAARPGSSLALSLTADQMVSALLDA | 418 | 419 |
| CD8α leader; | EPPILYSEYDPTRPFSEASMMGLLTNLADRELVHMINWAKRV | | |
| Linker (GS); ER | PGFVDLTLHDQVHLLECAWMEILMIGLVWRSMEHPGKLLFA | | |
| (aa 305-549 of | PNLLLDRDQGKCVEGGVEIFDMLLATSSRFRMMNLQGEEFV | | |
| WT, L384M, | CLKSIILLNSGVYTFLSSTLKSLEEKDHIHRVLDKITDTLIHLM | | |
| N413D, M421G, | AKAGLTLQQQHQRLAQLLLILSHIRHMSNKRMEHLYSMKCK | | |
| G521R, Y537S); | NVVPLSDLLLEMLDAHRLGSESRRVRRNKRSKDIQMTQTTSS | | |
| Linker (GS); | LSASLGDRVTISCRASQDISKYLNWYQQKPDGTVKLLIYHTS | | |
| Modified Furin; | RLHSGVPSRFSGSGSGTDYSLTISNLEQEDIATYFCQQGNTLP | | |
| CD19 scFv; CD8a | YTFGGGTKLEITGGGGSGGGGSGGGGSEVKLQESGPGLVAPS | | |
| Hinge and | QSLSVTCTVSGVSLPDYGVSWIRQPPRKGLEWLGVIWGSETT | | |
| Transmembrane | YYNSALKSRLTIIKDNSKSQVFLKMNSLQTDDTAIYYCAKHY | | |
| Domain; CD28 co- | YYGGSYAMDYWGQGTSVTVSSTTTPAPRPPTPAPTIASQPLS | | |
| stimulatory | LRPEACRPAAGGAVHTRGLDFACDIYIWAPLAGTCGVLLLSL | | |
| domain/4-1BB | VITLYCKRGRKKLLYIFKQPFMRPVQTTQEEDGCSCRFPEEEE | | |
| intracellular | GGCELRVKFSRSADAPAYKQGQNQLYNELNLGRREEYDVL | | |
| domain; CD3 zeta | DKRRGRDPEMGGKPRRKNPQEGLYNELQKDKMAEAYSEIG | | |
| intracellular | [sequence omitted] | | |
| domain; stop) | | | |
| OT-002162 (Met; | MALPVTALLLPLALLLHAARPGSSLALSLTADQMVSALLDA | 420 | 421 |
| CD8α leader; | EPPILYSEYDPTRPFSEASMMGLLTNLADRELVHMINWAKRV | | |
| Linker (GS); ER | PGFVDLALHDQVHLLECAWMEILMIGLVWRSMEHPGKLLFA | | |
| (aa 305-549 of | PNLLLDRNQGKCVEGGVEIFDMLLATSSRFRMMNLQGEEFV | | |
| WT, T371A, | CLKSIILLNSGVYTFLSSTLKSLEEKDHIHRVLDKITDTLIHLM | | |
| L384M, M421G, | AKAGLTLQQQHQRLAQLLLILSHIRHMSSKRMEHLYSMKCK | | |
| N519S, G521R, | NVVPLSDLLLEMLDAHRLGSESRRVRRNKRSKDIQMTQTTSS | | |
| Y537S); Linker | LSASLGDRVTISCRASQDISKYLNWYQQKPDGTVKLLIYHTS | | |
| (GS); Modified | RLHSGVPSRFSGSGSGTDYSLTISNLEQEDIATYFCQQGNTLP | | |
| Furin; CD19 scFv; | YTFGGGTKLEITGGGGSGGGGSGGGGSEVKLQESGPGLVAPS | | |
| CD8a Hinge and | QSLSVTCTVSGVSLPDYGVSWIRQPPRKGLEWLGVIWGSETT | | |
| Transmembrane | YYNSALKSRLTIIKDNSKSQVFLKMNSLQTDDTAIYYCAKHY | | |
| Domain; CD28 co- | YYGGSYAMDYWGQGTSVTVSSTTTPAPRPPTPAPTIASQPLS | | |
| stimulatory | LRPEACRPAAGGAVHTRGLDFACDIYIWAPLAGTCGVLLLSL | | |
| domain/4-1BB | VITLYCKRGRKKLLYIFKQPFMRPVQTTQEEDGCSCRFPEEEE | | |
| intracellular | GGCELRVKFSRSADAPAYKQGQNQLYNELNLGRREEYDVL | | |
| domain; CD3 zeta | DKRRGRDPEMGGKPRRKNPQEGLYNELQKDKMAEAYSEIG | | |
| intracellular | [sequence omitted] | | |
| domain; stop) | | | |
| OT-002163 (Met; | MALPVTALLLPLALLLHAARPGSNLALSLTADQMVSALLDA | 422 | 423 |
| CD8α leader; | EPPILYSEYDPTRPFSEASMMGLLTNLADRELVHMINWAKRV | | |
| Linker (GS); ER | PGFVDLTLHDQVHLLECAWMEILMIGLVWRSMEHPGKLLFA | | |
| (aa 305-549 of | PNLLLDRNQGKCVEGGVEIFDMLLATSSRFRMMNLQVEEFV | | |
| WT, S305N, | CLKSIILLNSGVYTFLSSTLKSLEEKDHIHRVLDKITDTLIHLM | | |
| L384M, M421G, | AKAGLTLQQQHQRLAQLLLILSHIRHMSNKRMEHLYSMKCK | | |
| G442V, G521R, | NVVPLSDLLLEMLDAHRLGSESRRVRRNKRSKDIQMTQTTSS | | |
| Y537S); Linker | LSASLGDRVTISCRASQDISKYLNWYQQKPDGTVKLLIYHTS | | |
| (GS); Modified | RLHSGVPSRFSGSGSGTDYSLTISNLEQEDIATYFCQQGNTLP | | |
| Furin; CD19 scFv; | YTFGGGTKLEITGGGGSGGGGSGGGGSEVKLQESGPGLVAPS | | |
| CD8a Hinge and | QSLSVTCTVSGVSLPDYGVSWIRQPPRKGLEWLGVIWGSETT | | |
| Transmembrane | YYNSALKSRLTIIKDNSKSQVFLKMNSLQTDDTAIYYCAKHY | | |
| Domain; CD28 co- | YYGGSYAMDYWGQGTSVTVSSTTTPAPRPPTPAPTIASQPLS | | |
| stimulatory | LRPEACRPAAGGAVHTRGLDFACDIYIWAPLAGTCGVLLLSL | | |
| domain/4-1BB | VITLYCKRGRKKLLYIFKQPFMRPVQTTQEEDGCSCRFPEEEE | | |
| intracellular | GGCELRVKFSRSADAPAYKQGQNQLYNELNLGRREEYDVL | | |
| domain; CD3 zeta | DKRRGRDPEMGGKPRRKNPQEGLYNELQKDKMAEAYSEIG | | |
| intracellular | [sequence omitted] | | |
| domain; stop) | | | |
| OT-002164 (Met; | MALPVTALLLPLALLLHAARPGSSLALSLTADQMVSALLDA | 424 | 425 |
| CD8α leader; | EPPILYSEYDPTGPFSEASMMGLLTNLADRELVHMINWAKRV | | |
| Linker (GS); ER | PGFVDLTLHDQVHLLECAWMEILMIGLVWRSMEHPGKLLFA | | |
| (aa 305-549 of | PNLLLDRNQGKCVEGGVEIFDMLLATSSRFRMMNLQGEEFV | | |
| WT, R335G, | CLKSIILLNSGVYTFLSSTLKSLEEKDHIHRVLDKITDTLIHLM | | |
| L384M, M421G, | AKAGLTLQQQHQRLAQLLLILSHIRHMSSKRMEHLYSMKCK | | |
| N519S, G521R, | NVVPLSDLLLEMLDAHRLGSESRRVRRNKRSKDIQMTQTTSS | | |
| Y537S); Linker | LSASLGDRVTISCRASQDISKYLNWYQQKPDGTVKLLIYHTS | | |
| (GS); Modified | RLHSGVPSRFSGSGSGTDYSLTISNLEQEDIATYFCQQGNTLP | | |
| Furin; CD19 scFv; | YTFGGGTKLEITGGGGSGGGGSGGGGSEVKLQESGPGLVAPS | | |
| CD8a Hinge and | QSLSVTCTVSGVSLPDYGVSWIRQPPRKGLEWLGVIWGSETT | | |
| Transmembrane | YYNSALKSRLTIIKDNSKSQVFLKMNSLQTDDTAIYYCAKHY | | |
| Domain; CD28 co- | YYGGSYAMDYWGQGTSVTVSSTTTPAPRPPTPAPTIASQPLS | | |
| stimulatory | LRPEACRPAAGGAVHTRGLDFACDIYIWAPLAGTCGVLLLSL | | |
| domain/4-1BB | VITLYCKRGRKKLLYIFKQPFMRPVQTTQEEDGCSCRFPEEEE | | |
| intracellular | GGCELRVKFSRSADAPAYKQGQNQLYNELNLGRREEYDVL | | |
| domain; CD3 zeta | DKRRGRDPEMGGKPRRKNPQEGLYNELQKDKMAEAYSEIG | | |
| intracellular | [sequence omitted] | | |
| domain; stop) | | | |

[0169] In some embodiments, payloads of the disclosure may be cytokines, and fragments, variants, analogs and derivatives thereof, including but not limited to interleukins, tumor necrosis factors (TNFs), interferons (IFNs), TGF beta and chemokines.

[0170] In some embodiments, a cytokine may be an interleukin (IL) selected from IL′, IL1alpha (also called hematopoietin-1), IL1beta (catabolin), IL1 delta, IL1epsilon, IL1eta, IL1 zeta, interleukin-1 family member 1 to 11 (IL1F1 to IL1F11), interleukin-1 homolog 1 to 4 (IL1H1 to IL1H4), IL1 related protein 1 to 3 (IL1RP1 to IL1RP3), IL2, IL3, IL4, IL5, IL6, IL7, IL8, IL9, IL10, IL10C, IL10D, IL11, IL11a, IL11b, IL12, IL13, IL14, IL15, IL16, IL17, IL17A, Il17B, IL17C, IL17E, IL17F, 1118, IL19, IL20, IL20 like (IL20L), 1121, IL22, IL23, IL23A, IL23-p19, IL23-p40, IL24, 1125, IL26, IL27, IL28A, IL28B, IL29, IL30, IL31, IL32, IL33, IL34, IL35, IL36 alpha, IL36 beta, IL36 gamma, IL36RN, IL37, IL37a, IL37b, IL37c, IL37d, IL37e and IL38.

[0171] In certain embodiments, a cytokine may be a type I interferons (IFN) including IFN-alpha subtypes (IFN-α1, IFN-α1b, IFN-α1c), IFN-beta, IFN-delta subtypes (IFN-delta 1, IFN-delta 2, IFN-delta 8), IFN-gamma, IFN-kappa, and IFN-epsilon, IFN-lambda, IFN-omega, IFN-tau and IFN-zeta. In certain embodiments, a cytokine may be a member of tumor necrosis factor (TNF) superfamily, including TNF-alpha, TNF-beta (also known as lymphotoxin-alpha (LT-α)), lymphotoxin-beta (LT-β), CD40L(CD154), CD27L (CD70), CD30L(CD153), FASL(CD178), 4-1BBL (CD137L), OX40L, TRAIL (TNF-related apoptosis inducing ligand), APRIL (a proliferation-inducing ligand), TWEAK, TRANCE, TALL-1, GITRL, LIGHT and TNFSF1 to TNFSF20 (TNF ligand superfamily member 1 to 20).

[0172] It is understood in the art that certain gene and/or protein nomenclature for the same gene or protein may be inclusive or exclusive of punctuation such as a dash “-” or symbolic such as Greek letters. Whether these are included or excluded herein, the meaning is not meant to be changed as would be understood by one of skill in the art. For example, IL2, IL2 and IL 2 refer to the same interleukin. Likewise, TN alpha, TNFα, TNF-alpha, TNF-α, TNF alpha and TNF α all refer to the same protein.

[0173] In certain embodiments, a cytokine may be a chemokine selected from SCYA1-28 (CCL1-28), SCYB1-16 (CXCL1-16), SCYC1-2 (XCL1-2), SCYD-1, SCYE-1, XCL1, XCL2, CCL1, CCL2, CCL3, CCL4, CCL5, CCL6, CCL7, CCL8, CCL9, CCL10, CCL11, CCL12, CCL13, CCL14, CCL15, CCL16, CCL17, CCL18, CCL19, CCL20, CCL21, CCL22, CCL23, CCL24, CCL25, CCL26, CCL27, CCL28, CXCL1, CXCL2, CXCL3, CXCL4, CXCL5, CXCL6, CXCL7, CXCL8, CXCL9, CXCL10, CXCL11, CXCL12, CXCL13, CXCL14, CXCL15, CXCL16, CXCL17 and CX3CL1; or a chemokine receptor selected from XCR1, CCR1, CCR2, CCR3, CCR4, CCR5, CCR6, CCR7, CCR8, CCR9, CCR10, CXCR1, CXCR2, CXCR3, CXCR4, CXCR5 and CX3CR1.

[0174] In one aspect, the payload of the disclosure may be IL12 fusion. This regulatable DD-IL12 fusion polypeptide may be directly used as an immunotherapeutic agent or be transduced into an immune effector cell (T cells and TIL cells) to generate modified T cells with greater in vivo expansion and survival capabilities for adoptive cell transfer. In some embodiments, the IL12 may be referred to as “Flexi IL12,” wherein both p35 and p40 subunits are encoded by a single cDNA that produces a single chain polypeptide. In some aspects, the human ER-IL12 comprises the amino acid sequences described in Table 7. Nucleic acid sequences encoding the amino acid sequences are also described in Table 7. In Table 7, the amino acid sequences may comprise a stop codon at the end which is denoted in the table with a “*”. The components of the ER-IL12 constructs are described in Table 4.

TABLE 7
IL12 Constructs

| | | | AA | NA |
|---|---|---|---|---|
| | | | SEQ | SEQ |
| Construct | | | ID | ID |
| ID | Description | AA sequence | NO. | NO. |
| OT-001563 | IL12B (p40) | MCHQQLVISWFSLVFLASPLVAIWELKKDVYVVELD | 158 | 159 |
| | signal | WYPDAPGEMVVLTCDTPEEDGITWTLDQSSEVLGSGK | | |
| | sequence; | TLTIQVKEFGDAGQYTCHKGGEVLSHSLLLLHKKEDG | | |
| | IL12B (p40) | IWSTDILKDQKEPKNKTFLRCEAKNYSGRFTCWWLTT | | |
| | (23-328 of | ISTDLTFSVKSSRGSSDPQGVTCGAATLSAERVRGDNK | | |
| | WT); Linker | EYEYSVECQEDSACPAAEESLPIEVMVDAVHKLKYEN | | |
| | ((G4S)3; IL12A | YTSSFFIRDIIKPDPPKNLQLKPLKNSRQVEVSWEYPDT | | |
| | (p35) (57-253 | WSTPHSYFSLTFCVQVQGKSKREKKDRVFTDKTSATV | | |
| | of WT); Linker | ICRKNASISVRAQDRYYSSSWSEWASVPCSGGGGSGG | | |
| | (GS); stop | GGSGGGGSRNLPVATPDPGMFPCLHHSQNLLRAVSN | | |
| | | MLQKARQTLEFYPCTSEEIDHEDITKDKTSTVEACLPL | | |
| | | ELTKNESCLNSRETSFITNGSCLASRKTSFMMALCLSSI | | |
| | | YEDLKMYQVEFKTMNAKLLMDPKRQIFLDQNMLAVI | | |
| | | DELMQALNFNSETVPQKSSLEEPDFYKTKIKLCILLHA | | |
| | | FRIRAVTIDRVMSYLNASGS* | | |
| OT-001569 | IL12B (p40) | MCHQQLVISWFSLVFLASPLVAGSSLALSLTADQMVS | 160 | 161 |
| | signal | ALLDAEPPILYSEYDPTRPFSEASMMGLLTNLADRELV | | |
| | sequence; | HMINWAKRVPGFVDLALHDQVHLLECAWMEILMIGL | | |
| | Linker (GS); | VWRSMEHPGKLLFAPNLLLDRNQGKCVEGGVEIFDM | | |
| | ER (aa 305-549 | LLATSSRFRMMNLQGEEFVCLKSIILLNSGVYTFLSSTL | | |
| | of WT, T371A, | KSLEEKDHIHRVLDKITDTLIHLMAKAGLTLQQQHQR | | |
| | L384M, | LAQLLLILSHIRHMSSKRMEHLYSMKCKNVVPLSDLL | | |
| | M421G, | LEMLDAHRLGSIWELKKDVYVVELDWYPDAPGEMV | | |
| | N519S, G521R, | VLTCDTPEEDGITWTLDQSSEVLGSGKTLTIQVKEFGD | | |
| | Y537S); Linker | AGQYTCHKGGEVLSHSLLLLHKKEDGIWSTDILKDQK | | |
| | (GS); IL12B | EPKNKTFLRCEAKNYSGRFTCWWLTTISTDLTFSVKSS | | |
| | (p40) (23-328 | RGSSDPQGVTCGAATLSAERVRGDNKEYEYSVECQED | | |
| | of WT); Linker | SACPAAEESLPIEVMVDAVHKLKYENYTSSHIRDIIKP | | |
| | ((G4S)3; IL12A | DPPKNLQLKPLKNSRQVEVSWEYPDTWSTPHSYFSLT | | |
| | (p35) (57-253 | FCVQVQGKSKREKKDRVFTDKTSATVICRKNASISVR | | |
| | of WT); stop | AQDRYYSSSWSEWASVPCSGGGGSGGGGSGGGGSRN | | |
| | | LPVATPDPGMFPCLHHSQNLLRAVSNMLQKARQTLEF | | |
| | | YPCTSEEIDHEDITKDKTSTVEACLPLELTKNESCLNSR | | |
| | | ETSFITNGSCLASRKTSFMMALCLSSIYEDLKMYQVEF | | |
| | | KTMNAKLLMDPKRQIFLDQNMLAVIDELMQALNFNS | | |
| | | ETVPQKSSLEEPDFYKTKIKLCILLHAFRIRAVTIDRVM | | |
| | | SYLNAS* | | |
| OT-001707 | IL12B (p40) | MCHQQLVISWFSLVFLASPLVAIWELKKDVYVVELD | 162 | 163 |
| | signal | WYPDAPGEMVVLTCDTPEEDGITWTLDQSSEVLGSGK | | |
| | sequence; | TLTIQVKEFGDAGQYTCHKGGEVLSHSLLLLHKKEDG | | |
| | IL12B (p40) | IWSTDILKDQKEPKNKTFLRCEAKNYSGRFTCWWLTT | | |
| | (23-328 of | ISTDLTFSVKSSRGSSDPQGVTCGAATLSAERVRGDNK | | |
| | WT); Linker | EYEYSVECQEDSACPAAEESLPIEVMVDAVHKLKYEN | | |
| | ((G4S)3; IL12A | YTSSFFIRDIIKPDPPKNLQLKPLKNSRQVEVSWEYPDT | | |
| | (p35) (57-253 | WSTPHSYFSLTFCVQVQGKSKREKKDRVFTDKTSATV | | |
| | of WT); Linker | ICRKNASISVRAQDRYYSSSWSEWASVPCSGGGGSGG | | |
| | (GS); ER (aa | GGSGGGGSRNLPVATPDPGMFPCLHHSQNLLRAVSN | | |
| | 305-549 of WT, | MLQKARQTLEFYPCTSEEIDHEDITKDKTSTVEACLPL | | |
| | L384M, | ELTKNESCLNSRETSFITNGSCLASRKTSFMMALCLSSI | | |
| | N413D, | YEDLKMYQVEFKTMNAKLLMDPKRQIFLDQNMLAVI | | |
| | M421G, | DELMQALNFNSETVPQKSSLEEPDFYKTKIKLCILLHA | | |
| | G521R, | FRIRAVTIDRVMSYLNASGSSLALSLTADQMVSALLD | | |
| | Y537S); stop | AEPPILYSEYDPTRPFSEASMMGLLTNLADRELVHMIN | | |
| | | WAKRVPGFVDLTLHDQVHLLECAWMEILMIGLVWRS | | |
| | | MEHPGKLLFAPNLLLDRDQGKCVEGGVEIFDMLLATS | | |
| | | SRFRMMNLQGEEFVCLKSIILLNSGVYTFLSSTLKSLEE | | |
| | | KDHIHRVLDKITDTLIHLMAKAGLTLQQQHQRLAQLL | | |
| | | LILSHIRHMSNKRMEHLYSMKCKNVVPLSDLLLEMLD | | |
| | | AHRL* | | |
| OT-001706 | IL12B (p40) | MCHQQLVISWFSLVFLASPLVAIWELKKDVYVVELD | 164 | 165 |
| | signal | WYPDAPGEMVVLTCDTPEEDGITWTLDQSSEVLGSGK | | |
| | sequence; | TLTIQVKEFGDAGQYTCHKGGEVLSHSLLLLHKKEDG | | |
| | IL12B (p40) | IWSTDILKDQKEPKNKTFLRCEAKNYSGRFTCWWLTT | | |
| | (23-328 of | ISTDLTFSVKSSRGSSDPQGVTCGAATLSAERVRGDNK | | |
| | WT); Linker | EYEYSVECQEDSACPAAEESLPIEVMVDAVHKLKYEN | | |
| | ((G4S)3; IL12A | YTSSFFIRDIIKPDPPKNLQLKPLKNSRQVEVSWEYPDT | | |
| | (p35) (57-253 | WSTPHSYFSLTFCVQVQGKSKREKKDRVFTDKTSATV | | |
| | of WT); Linker | ICRKNASISVRAQDRYYSSSWSEWASVPCSGGGGSGG | | |
| | (GS); ER (aa | GGSGGGGSRNLPVATPDPGMFPCLHHSQNLLRAVSN | | |
| | 305-549 of WT, | MLQKARQTLEFYPCTSEEIDHEDITKDKTSTVEACLPL | | |
| | L384M, | ELTKNESCLNSRETSFITNGSCLASRKTSFMMALCLSSI | | |
| | N413F, | YEDLKMYQVEFKTMNAKLLMDPKRQIFLDQNMLAVI | | |
| | M421G, | DELMQALNFNSETVPQKSSLEEPDFYKTKIKLCILLHA | | |
| | G521R, | FRIRAVTIDRVMSYLNASGSSLALSLTADQMVSALLD | | |
| | Y537S; stop | AEPPILYSEYDPTRPFSEASMMGLLTNLADRELVHMIN | | |
| | | WAKRVPGFVDLTLHDQVHLLECAWMEILMIGLVWRS | | |
| | | MEHPGKLLFAPNLLLDRFQGKCVEGGVEIFDMLLATS | | |
| | | SRFRMMNLQGEEFVCLKSIILLNSGVYTFLSSTLKSLEE | | |
| | | KDHIHRVLDKITDTLIHLMAKAGLTLQQQHQRLAQLL | | |
| | | LILSHIRHMSNKRMEHLYSMKCKNVVPLSDLLLEMLD | | |
| | | AHRL* | | |
| OT-001705 | IL12B (p40) | MCHQQLVISWFSLVFLASPLVAIWELKKDVYVVELD | 166 | 167 |
| | signal | WYPDAPGEMVVLTCDTPEEDGITWTLDQSSEVLGSGK | | |
| | sequence; | TLTIQVKEFGDAGQYTCHKGGEVLSHSLLLLHKKEDG | | |
| | IL12B (p40) | IWSTDILKDQKEPKNKTFLRCEAKNYSGRFTCWWLTT | | |
| | (23-328 of | ISTDLTFSVKSSRGSSDPQGVTCGAATLSAERVRGDNK | | |
| | WT); Linker | EYEYSVECQEDSACPAAEESLPIEVMVDAVHKLKYEN | | |
| | ((G4S)3; IL12A | YTSSFFIRDIIKPDPPKNLQLKPLKNSRQVEVSWEYPDT | | |
| | (p35) (57-253 | WSTPHSYFSLTFCVQVQGKSKREKKDRVFTDKTSATV | | |
| | of WT); Linker | ICRKNASISVRAQDRYYSSSWSEWASVPCSGGGGSGG | | |
| | (GS); ER (aa | GGSGGGGSRNLPVATPDPGMFPCLHHSQNLLRAVSN | | |
| | 305-549 of WT, | MLQKARQTLEFYPCTSEEIDHEDITKDKTSTVEACLPL | | |
| | L384M, | ELTKNESCLNSRETSFITNGSCLASRKTSFMMALCLSSI | | |
| | N413L, | YEDLKMYQVEFKTMNAKLLMDPKRQIFLDQNMLAVI | | |
| | M421G, | DELMQALNFNSETVPQKSSLEEPDFYKTKIKLCILLHA | | |
| | G521R, | FRIRAVTIDRVMSYLNASGSSLALSLTADQMVSALLD | | |
| | Y537S); stop | AEPPILYSEYDPTRPFSEASMMGLLTNLADRELVHMIN | | |
| | | WAKRVPGFVDLTLHDQVHLLECAWMEILMIGLVWRS | | |
| | | MEHPGKLLFAPNLLLDRLQGKCVEGGVEIFDMLLATS | | |
| | | SRFRMMNLQGEEFVCLKSIILLNSGVYTFLSSTLKSLEE | | |
| | | KDHIHRVLDKITDTLIHLMAKAGLTLQQQHQRLAQLL | | |
| | | LILSHIRHMSNKRMEHLYSMKCKNVVPLSDLLLEMLD | | |
| | | AHRL* | | |
| OT-001704 | IL12B (p40) | MCHQQLVISWFSLVFLASPLVAIWELKKDVYVVELD | 168 | 169 |
| | signal | WYPDAPGEMVVLTCDTPEEDGITWTLDQSSEVLGSGK | | |
| | sequence; | TLTIQVKEFGDAGQYTCHKGGEVLSHSLLLLHKKEDG | | |
| | IL12B (p40) | IWSTDILKDQKEPKNKTFLRCEAKNYSGRFTCWWLTT | | |
| | (23-328 of | ISTDLTFSVKSSRGSSDPQGVTCGAATLSAERVRGDNK | | |
| | WT); Linker | EYEYSVECQEDSACPAAEESLPIEVMVDAVHKLKYEN | | |
| | ((G4S)3; IL12A | YTSSFFIRDIIKPDPPKNLQLKPLKNSRQVEVSWEYPDT | | |
| | (p35) (57-253 | WSTPHSYFSLTFCVQVQGKSKREKKDRVFTDKTSATV | | |
| | of WT); Linker | ICRKNASISVRAQDRYYSSSWSEWASVPCSGGGGSGG | | |
| | (GS); ER (aa | GGSGGGGSRNLPVATPDPGMFPCLHHSQNLLRAVSN | | |
| | 305-549 of WT, | MLQKARQTLEFYPCTSEEIDHEDITKDKTSTVEACLPL | | |
| | L384M, | ELTKNESCLNSRETSFITNGSCLASRKTSFMMALCLSSI | | |
| | N413Y, | YEDLKMYQVEFKTMNAKLLMDPKRQIFLDQNMLAVI | | |
| | M421G, | DELMQALNFNSETVPQKSSLEEPDFYKTKIKLCILLHA | | |
| | G521R, | FRIRAVTIDRVMSYLNASGSSLALSLTADQMVSALLD | | |
| | Y537S); stop | AEPPILYSEYDPTRPFSEASMMGLLTNLADRELVHMIN | | |
| | | WAKRVPGFVDLTLHDQVHLLECAWMEILMIGLVWRS | | |
| | | MEHPGKLLFAPNLLLDRYQGKCVEGGVEIFDMLLATS | | |
| | | SRFRMMNLQGEEFVCLKSIILLNSGVYTFLSSTLKSLEE | | |
| | | KDHIHRVLDKITDTLIHLMAKAGLTLQQQHQRLAQLL | | |
| | | LILSHIRHMSNKRMEHLYSMKCKNVVPLSDLLLEMLD | | |
| | | AHRL* | | |
| OT-001703 | IL12B (p40) | MCHQQLVISWFSLVFLASPLVAIWELKKDVYVVELD | 170 | 171 |
| | signal | WYPDAPGEMVVLTCDTPEEDGITWTLDQSSEVLGSGK | | |
| | sequence; | TLTIQVKEFGDAGQYTCHKGGEVLSHSLLLLHKKEDG | | |
| | IL12B (p40) | IWSTDILKDQKEPKNKTFLRCEAKNYSGRFTCWWLTT | | |
| | (23-328 of | ISTDLTFSVKSSRGSSDPQGVTCGAATLSAERVRGDNK | | |
| | WT); Linker | EYEYSVECQEDSACPAAEESLPIEVMVDAVHKLKYEN | | |
| | ((G4S)3; IL12A | YTSSFFIRDIIKPDPPKNLQLKPLKNSRQVEVSWEYPDT | | |
| | (p35) (57-253 | WSTPHSYFSLTFCVQVQGKSKREKKDRVFTDKTSATV | | |
| | of WT); Linker | ICRKNASISVRAQDRYYSSSWSEWASVPCSGGGGSGG | | |
| | (GS); ER (aa | GGSGGGGSRNLPVATPDPGMFPCLHHSQNLLRAVSN | | |
| | 305-549 of WT, | MLQKARQTLEFYPCTSEEIDHEDITKDKTSTVEACLPL | | |
| | L384M, | ELTKNESCLNSRETSFITNGSCLASRKTSFMMALCLSSI | | |
| | N413H, | YEDLKMYQVEFKTMNAKLLMDPKRQIFLDQNMLAVI | | |
| | M421G, | DELMQALNFNSETVPQKSSLEEPDFYKTKIKLCILLHA | | |
| | G521R, | FRIRAVTIDRVMSYLNASGSSLALSLTADQMVSALLD | | |
| | Y537S); stop | AEPPILYSEYDPTRPFSEASMMGLLTNLADRELVHMIN | | |
| | | WAKRVPGFVDLTLHDQVHLLECAWMEILMIGLVWRS | | |
| | | MEHPGKLLFAPNLLLDRHQGKCVEGGVEIFDMLLATS | | |
| | | SRFRMMNLQGEEFVCLKSIILLNSGVYTFLSSTLKSLEE | | |
| | | KDHIHRVLDKITDTLIHLMAKAGLTLQQQHQRLAQLL | | |
| | | LILSHIRHMSNKRMEHLYSMKCKNVVPLSDLLLEMLD | | |
| | | AHRL* | | |
| OT-001702 | IL12B (p40) | MCHQQLVISWFSLVFLASPLVAIWELKKDVYVVELD | 172 | 173 |
| | signal | WYPDAPGEMVVLTCDTPEEDGITWTLDQSSEVLGSGK | | |
| | sequence; | TLTIQVKEFGDAGQYTCHKGGEVLSHSLLLLHKKEDG | | |
| | IL12B (p40) | IWSTDILKDQKEPKNKTFLRCEAKNYSGRFTCWWLTT | | |
| | (23-328 of | ISTDLTFSVKSSRGSSDPQGVTCGAATLSAERVRGDNK | | |
| | WT); Linker | EYEYSVECQEDSACPAAEESLPIEVMVDAVHKLKYEN | | |
| | ((G4S)3; IL12A | YTSSFFIRDIIKPDPPKNLQLKPLKNSRQVEVSWEYPDT | | |
| | (p35) (57-253 | WSTPHSYFSLTFCVQVQGKSKREKKDRVFTDKTSATV | | |
| | of WT); Linker | ICRKNASISVRAQDRYYSSSWSEWASVPCSGGGGSGG | | |
| | (GS); ER (aa | GGSGGGGSRNLPVATPDPGMFPCLHHSQNLLRAVSN | | |
| | 305-549 of WT, | MLQKARQTLEFYPCTSEEIDHEDITKDKTSTVEACLPL | | |
| | L384M, | ELTKNESCLNSRETSFITNGSCLASRKTSFMMALCLSSI | | |
| | N413Q, | YEDLKMYQVEFKTMNAKLLMDPKRQIFLDQNMLAVI | | |
| | M421G, | DELMQALNFNSETVPQKSSLEEPDFYKTKIKLCILLHA | | |
| | G521R, | FRIRAVTIDRVMSYLNASGSSLALSLTADQMVSALLD | | |
| | Y537S); stop | AEPPILYSEYDPTRPFSEASMMGLLTNLADRELVHMIN | | |
| | | WAKRVPGFVDLTLHDQVHLLECAWMEILMIGLVWRS | | |
| | | MEHPGKLLFAPNLLLDRQQGKCVEGGVEIFDMLLATS | | |
| | | SRFRMMNLQGEEFVCLKSIILLNSGVYTFLSSTLKSLEE | | |
| | | KDHIHRVLDKITDTLIHLMAKAGLTLQQQHQRLAQLL | | |
| | | LILSHIRHMSNKRMEHLYSMKCKNVVPLSDLLLEMLD | | |
| | | AHRL* | | |
| OT-001701 | IL12B (p40) | MCHQQLVISWFSLVFLASPLVAIWELKKDVYVVELD | 174 | 175 |
| | signal | WYPDAPGEMVVLTCDTPEEDGITWTLDQSSEVLGSGK | | |
| | sequence; | TLTIQVKEFGDAGQYTCHKGGEVLSHSLLLLHKKEDG | | |
| | IL12B (p40) | IWSTDILKDQKEPKNKTFLRCEAKNYSGRFTCWWLTT | | |
| | (23-328 of | ISTDLTFSVKSSRGSSDPQGVTCGAATLSAERVRGDNK | | |
| | WT); Linker | EYEYSVECQEDSACPAAEESLPIEVMVDAVHKLKYEN | | |
| | ((G4S)3; IL12A | YTSSFFIRDIIKPDPPKNLQLKPLKNSRQVEVSWEYPDT | | |
| | (p35) (57-253 | WSTPHSYFSLTFCVQVQGKSKREKKDRVFTDKTSATV | | |
| | of WT); Linker | ICRKNASISVRAQDRYYSSSWSEWASVPCSGGGGSGG | | |
| | (GS); ER (aa | GGSGGGGSRNLPVATPDPGMFPCLHHSQNLLRAVSN | | |
| | 305-549 of WT, | MLQKARQTLEFYPCTSEEIDHEDITKDKTSTVEACLPL | | |
| | L384M, N413I, | ELTKNESCLNSRETSFITNGSCLASRKTSFMMALCLSSI | | |
| | M421G, | YEDLKMYQVEFKTMNAKLLMDPKRQIFLDQNMLAVI | | |
| | G521R, | DELMQALNFNSETVPQKSSLEEPDFYKTKIKLCILLHA | | |
| | Y537S); stop | FRIRAVTIDRVMSYLNASGSSLALSLTADQMVSALLD | | |
| | | AEPPILYSEYDPTRPFSEASMMGLLTNLADRELVHMIN | | |
| | | WAKRVPGFVDLTLHDQVHLLECAWMEILMIGLVWRS | | |
| | | MEHPGKLLFAPNLLLDRIQGKCVEGGVEIFDMLLATSS | | |
| | | RFRMMNLQGEEFVCLKSIILLNSGVYTFLSSTLKSLEE | | |
| | | KDHIHRVLDKITDTLIHLMAKAGLTLQQQHQRLAQLL | | |
| | | LILSHIRHMSNKRMEHLYSMKCKNVVPLSDLLLEMLD | | |
| | | AHRL* | | |
| OT-001700 | IL12B (p40) | MCHQQLVISWFSLVFLASPLVAIWELKKDVYVVELD | 176 | 177 |
| | signal | WYPDAPGEMVVLTCDTPEEDGITWTLDQSSEVLGSGK | | |
| | sequence; | TLTIQVKEFGDAGQYTCHKGGEVLSHSLLLLHKKEDG | | |
| | IL12B (p40) | IWSTDILKDQKEPKNKTFLRCEAKNYSGRFTCWWLTT | | |
| | (23-328 of | ISTDLTFSVKSSRGSSDPQGVTCGAATLSAERVRGDNK | | |
| | WT); Linker | EYEYSVECQEDSACPAAEESLPIEVMVDAVHKLKYEN | | |
| | ((G4S)3; IL12A | YTSSFFIRDIIKPDPPKNLQLKPLKNSRQVEVSWEYPDT | | |
| | (p35) (57-253 | WSTPHSYFSLTFCVQVQGKSKREKKDRVFTDKTSATV | | |
| | of WT); Linker | ICRKNASISVRAQDRYYSSSWSEWASVPCSGGGGSGG | | |
| | (GS); ER (aa | GGSGGGGSRNLPVATPDPGMFPCLHHSQNLLRAVSN | | |
| | 305-549 of WT, | MLQKARQTLEFYPCTSEEIDHEDITKDKTSTVEACLPL | | |
| | L384M, | ELTKNESCLNSRETSFITNGSCLASRKTSFMMALCLSSI | | |
| | N413M, | YEDLKMYQVEFKTMNAKLLMDPKRQIFLDQNMLAVI | | |
| | M421G, | DELMQALNFNSETVPQKSSLEEPDFYKTKIKLCILLHA | | |
| | G521R, | FRIRAVTIDRVMSYLNASGSSLALSLTADQMVSALLD | | |
| | Y537S); stop | AEPPILYSEYDPTRPFSEASMMGLLTNLADRELVHMIN | | |
| | | WAKRVPGFVDLTLHDQVHLLECAWMEILMIGLVWRS | | |
| | | MEHPGKLLFAPNLLLDRMQGKCVEGGVEIFDMLLATS | | |
| | | SRFRMMNLQGEEFVCLKSIILLNSGVYTFLSSTLKSLEE | | |
| | | KDHIHRVLDKITDTLIHLMAKAGLTLQQQHQRLAQLL | | |
| | | LILSHIRHMSNKRMEHLYSMKCKNVVPLSDLLLEMLD | | |
| | | AHRL* | | |
| OT-001699 | IL12B (p40) | MCHQQLVISWFSLVFLASPLVAIWELKKDVYVVELD | 178 | 179 |
| | signal | WYPDAPGEMVVLTCDTPEEDGITWTLDQSSEVLGSGK | | |
| | sequence; | TLTIQVKEFGDAGQYTCHKGGEVLSHSLLLLHKKEDG | | |
| | IL12B (p40) | IWSTDILKDQKEPKNKTFLRCEAKNYSGRFTCWWLTT | | |
| | (23-328 of | ISTDLTFSVKSSRGSSDPQGVTCGAATLSAERVRGDNK | | |
| | WT); Linker | EYEYSVECQEDSACPAAEESLPIEVMVDAVHKLKYEN | | |
| | ((G4S)3; IL12A | YTSSFFIRDIIKPDPPKNLQLKPLKNSRQVEVSWEYPDT | | |
| | (p35) (57-253 | WSTPHSYFSLTFCVQVQGKSKREKKDRVFTDKTSATV | | |
| | of WT); Linker | ICRKNASISVRAQDRYYSSSWSEWASVPCSGGGGSGG | | |
| | (GS); ER (aa | GGSGGGGSRNLPVATPDPGMFPCLHHSQNLLRAVSN | | |
| | 305-549 of WT, | MLQKARQTLEFYPCTSEEIDHEDITKDKTSTVEACLPL | | |
| | L384M, | ELTKNESCLNSRETSFITNGSCLASRKTSFMMALCLSSI | | |
| | M421G, | YEDLKMYQVEFKTMNAKLLMDPKRQIFLDQNMLAVI | | |
| | G521R, | DELMQALNFNSETVPQKSSLEEPDFYKTKIKLCILLHA | | |
| | Y537S); stop | FRIRAVTIDRVMSYLNASGSSLALSLTADQMVSALLD | | |
| | | AEPPILYSEYDPTRPFSEASMMGLLTNLADRELVHMIN | | |
| | | WAKRVPGFVDLTLHDQVHLLECAWMEILMIGLVWRS | | |
| | | MEHPGKLLFAPNLLLDRNQGKCVEGGVEIFDMLLATS | | |
| | | SRFRMMNLQGEEFVCLKSIILLNSGVYTFLSSTLKSLEE | | |
| | | KDHIHRVLDKITDTLIHLMAKAGLTLQQQHQRLAQLL | | |
| | | LILSHIRHMSNKRMEHLYSMKCKNVVPLSDLLLEMLD | | |
| | | AHRL* | | |
| OT-001698 | IL12B (p40) | MCHQQLVISWFSLVFLASPLVAIWELKKDVYVVELD | 180 | 181 |
| | signal | WYPDAPGEMVVLTCDTPEEDGITWTLDQSSEVLGSGK | | |
| | sequence; | TLTIQVKEFGDAGQYTCHKGGEVLSHSLLLLHKKEDG | | |
| | IL12B (p40) | IWSTDILKDQKEPKNKTFLRCEAKNYSGRFTCWWLTT | | |
| | (23-328 of | ISTDLTFSVKSSRGSSDPQGVTCGAATLSAERVRGDNK | | |
| | WT); Linker | EYEYSVECQEDSACPAAEESLPIEVMVDAVHKLKYEN | | |
| | ((G4S)3; IL12A | YTSSFFIRDIIKPDPPKNLQLKPLKNSRQVEVSWEYPDT | | |
| | (p35) (57-253 | WSTPHSYFSLTFCVQVQGKSKREKKDRVFTDKTSATV | | |
| | of WT); Linker | ICRKNASISVRAQDRYYSSSWSEWASVPCSGGGGSGG | | |
| | (GS); ER (aa | GGSGGGGSRNLPVATPDPGMFPCLHHSQNLLRAVSN | | |
| | 305-549 of WT, | MLQKARQTLEFYPCTSEEIDHEDITKDKTSTVEACLPL | | |
| | L384M, | ELTKNESCLNSRETSFITNGSCLASRKTSFMMALCLSSI | | |
| | N413K, | YEDLKMYQVEFKTMNAKLLMDPKRQIFLDQNMLAVI | | |
| | M421G, | DELMQALNFNSETVPQKSSLEEPDFYKTKIKLCILLHA | | |
| | G521R, | FRIRAVTIDRVMSYLNASGSSLALSLTADQMVSALLD | | |
| | Y537S); stop | AEPPILYSEYDPTRPFSEASMMGLLTNLADRELVHMIN | | |
| | | WAKRVPGFVDLTLHDQVHLLECAWMEILMIGLVWRS | | |
| | | MEHPGKLLFAPNLLLDRKQGKCVEGGVEIFDMLLATS | | |
| | | SRFRMMNLQGEEFVCLKSIILLNSGVYTFLSSTLKSLEE | | |
| | | KDHIHRVLDKITDTLIHLMAKAGLTLQQQHQRLAQLL | | |
| | | LILSHIRHMSNKRMEHLYSMKCKNVVPLSDLLLEMLD | | |
| | | AHRL* | | |
| OT-001697 | IL12B (p40) | MCHQQLVISWFSLVFLASPLVAIWELKKDVYVVELD | 182 | 183 |
| | signal | WYPDAPGEMVVLTCDTPEEDGITWTLDQSSEVLGSGK | | |
| | sequence; | TLTIQVKEFGDAGQYTCHKGGEVLSHSLLLLHKKEDG | | |
| | IL12B (p40) | IWSTDILKDQKEPKNKTFLRCEAKNYSGRFTCWWLTT | | |
| | (23-328 of | ISTDLTFSVKSSRGSSDPQGVTCGAATLSAERVRGDNK | | |
| | WT); Linker | EYEYSVECQEDSACPAAEESLPIEVMVDAVHKLKYEN | | |
| | ((G4S)3; IL12A | YTSSFFIRDIIKPDPPKNLQLKPLKNSRQVEVSWEYPDT | | |
| | (p35) (57-253 | WSTPHSYFSLTFCVQVQGKSKREKKDRVFTDKTSATV | | |
| | of WT); Linker | ICRKNASISVRAQDRYYSSSWSEWASVPCSGGGGSGG | | |
| | (GS); ER (aa | GGSGGGGSRNLPVATPDPGMFPCLHHSQNLLRAVSN | | |
| | 305-549 of WT, | MLQKARQTLEFYPCTSEEIDHEDITKDKTSTVEACLPL | | |
| | L384M, | ELTKNESCLNSRETSFITNGSCLASRKTSFMMALCLSSI | | |
| | N413V, | YEDLKMYQVEFKTMNAKLLMDPKRQIFLDQNMLAVI | | |
| | M421G, | DELMQALNFNSETVPQKSSLEEPDFYKTKIKLCILLHA | | |
| | G521R, | FRIRAVTIDRVMSYLNASGSSLALSLTADQMVSALLD | | |
| | Y537S); stop | AEPPILYSEYDPTRPFSEASMMGLLTNLADRELVHMIN | | |
| | | WAKRVPGFVDLTLHDQVHLLECAWMEILMIGLVWRS | | |
| | | MEHPGKLLFAPNLLLDRVQGKCVEGGVEIFDMLLATS | | |
| | | SRFRMMNLQGEEFVCLKSIILLNSGVYTFLSSTLKSLEE | | |
| | | KDHIHRVLDKITDTLIHLMAKAGLTLQQQHQRLAQLL | | |
| | | LILSHIRHMSNKRMEHLYSMKCKNVVPLSDLLLEMLD | | |
| | | AHRL* | | |
| OT-001696 | IL12B (p40) | MCHQQLVISWFSLVFLASPLVAIWELKKDVYVVELD | 184 | 185 |
| | signal | WYPDAPGEMVVLTCDTPEEDGITWTLDQSSEVLGSGK | | |
| | sequence; | TLTIQVKEFGDAGQYTCHKGGEVLSHSLLLLHKKEDG | | |
| | IL12B (p40) | IWSTDILKDQKEPKNKTFLRCEAKNYSGRFTCWWLTT | | |
| | (23-328 of | ISTDLTFSVKSSRGSSDPQGVTCGAATLSAERVRGDNK | | |
| | WT); Linker | EYEYSVECQEDSACPAAEESLPIEVMVDAVHKLKYEN | | |
| | ((G4S)3; IL12A | YTSSFFIRDIIKPDPPKNLQLKPLKNSRQVEVSWEYPDT | | |
| | (p35) (57-253 | WSTPHSYFSLTFCVQVQGKSKREKKDRVFTDKTSATV | | |
| | of WT); Linker | ICRKNASISVRAQDRYYSSSWSEWASVPCSGGGGSGG | | |
| | (GS); ER (aa | GGSGGGGSRNLPVATPDPGMFPCLHHSQNLLRAVSN | | |
| | 305-549 of WT, | MLQKARQTLEFYPCTSEEIDHEDITKDKTSTVEACLPL | | |
| | L384M, | ELTKNESCLNSRETSFITNGSCLASRKTSFMMALCLSSI | | |
| | N413S, | YEDLKMYQVEFKTMNAKLLMDPKRQIFLDQNMLAVI | | |
| | M421G, | DELMQALNFNSETVPQKSSLEEPDFYKTKIKLCILLHA | | |
| | G521R, | FRIRAVTIDRVMSYLNASGSSLALSLTADQMVSALLD | | |
| | Y537S); stop | AEPPILYSEYDPTRPFSEASMMGLLTNLADRELVHMIN | | |
| | | WAKRVPGFVDLTLHDQVHLLECAWMEILMIGLVWRS | | |
| | | MEHPGKLLFAPNLLLDRSQGKCVEGGVEIFDMLLATS | | |
| | | SRFRMMNLQGEEFVCLKSIILLNSGVYTFLSSTLKSLEE | | |
| | | KDHIHRVLDKITDTLIHLMAKAGLTLQQQHQRLAQLL | | |
| | | LILSHIRHMSNKRMEHLYSMKCKNVVPLSDLLLEMLD | | |
| | | AHRL* | | |
| OT-001695 | IL12B (p40) | MCHQQLVISWFSLVFLASPLVAIWELKKDVYVVELD | 186 | 187 |
| | signal | WYPDAPGEMVVLTCDTPEEDGITWTLDQSSEVLGSGK | | |
| | sequence; | TLTIQVKEFGDAGQYTCHKGGEVLSHSLLLLHKKEDG | | |
| | IL12B (p40) | IWSTDILKDQKEPKNKTFLRCEAKNYSGRFTCWWLTT | | |
| | (23-328 of | ISTDLTFSVKSSRGSSDPQGVTCGAATLSAERVRGDNK | | |
| | WT); Linker | EYEYSVECQEDSACPAAEESLPIEVMVDAVHKLKYEN | | |
| | ((G4S)3; IL12A | YTSSFFIRDIIKPDPPKNLQLKPLKNSRQVEVSWEYPDT | | |
| | (p35) (57-253 | WSTPHSYFSLTFCVQVQGKSKREKKDRVFTDKTSATV | | |
| | of WT); Linker | ICRKNASISVRAQDRYYSSSWSEWASVPCSGGGGSGG | | |
| | (GS); ER (aa | GGSGGGGSRNLPVATPDPGMFPCLHHSQNLLRAVSN | | |
| | 305-549 of WT, | MLQKARQTLEFYPCTSEEIDHEDITKDKTSTVEACLPL | | |
| | L384M, | ELTKNESCLNSRETSFITNGSCLASRKTSFMMALCLSSI | | |
| | N413C, | YEDLKMYQVEFKTMNAKLLMDPKRQIFLDQNMLAVI | | |
| | M421G, | DELMQALNFNSETVPQKSSLEEPDFYKTKIKLCILLHA | | |
| | G521R, | FRIRAVTIDRVMSYLNASGSSLALSLTADQMVSALLD | | |
| | Y537S); stop | AEPPILYSEYDPTRPFSEASMMGLLTNLADRELVHMIN | | |
| | | WAKRVPGFVDLTLHDQVHLLECAWMEILMIGLVWRS | | |
| | | MEHPGKLLFAPNLLLDRCQGKCVEGGVEIFDMLLATS | | |
| | | SRFRMMNLQGEEFVCLKSIILLNSGVYTFLSSTLKSLEE | | |
| | | KDHIHRVLDKITDTLIHLMAKAGLTLQQQHQRLAQLL | | |
| | | LILSHIRHMSNKRMEHLYSMKCKNVVPLSDLLLEMLD | | |
| | | AHRL* | | |
| OT-001694 | IL12B (p40) | MCHQQLVISWFSLVFLASPLVAIWELKKDVYVVELD | 188 | 189 |
| | signal | WYPDAPGEMVVLTCDTPEEDGITWTLDQSSEVLGSGK | | |
| | sequence; | TLTIQVKEFGDAGQYTCHKGGEVLSHSLLLLHKKEDG | | |
| | IL12B (p40) | IWSTDILKDQKEPKNKTFLRCEAKNYSGRFTCWWLTT | | |
| | (23-328 of | ISTDLTFSVKSSRGSSDPQGVTCGAATLSAERVRGDNK | | |
| | WT); Linker | EYEYSVECQEDSACPAAEESLPIEVMVDAVHKLKYEN | | |
| | ((G4S)3; IL12A | YTSSFFIRDIIKPDPPKNLQLKPLKNSRQVEVSWEYPDT | | |
| | (p35) (57-253 | WSTPHSYFSLTFCVQVQGKSKREKKDRVFTDKTSATV | | |
| | of WT); Linker | ICRKNASISVRAQDRYYSSSWSEWASVPCSGGGGSGG | | |
| | (GS); ER (aa | GGSGGGGSRNLPVATPDPGMFPCLHHSQNLLRAVSN | | |
| | 305-549 of WT, | MLQKARQTLEFYPCTSEEIDHEDITKDKTSTVEACLPL | | |
| | L384M, | ELTKNESCLNSRETSFITNGSCLASRKTSFMMALCLSSI | | |
| | N413W, | YEDLKMYQVEFKTMNAKLLMDPKRQIFLDQNMLAVI | | |
| | M421G, | DELMQALNFNSETVPQKSSLEEPDFYKTKIKLCILLHA | | |
| | G521R, | FRIRAVTIDRVMSYLNASGSSLALSLTADQMVSALLD | | |
| | Y537S); stop | AEPPILYSEYDPTRPFSEASMMGLLTNLADRELVHMIN | | |
| | | WAKRVPGFVDLTLHDQVHLLECAWMEILMIGLVWRS | | |
| | | MEHPGKLLFAPNLLLDRWQGKCVEGGVEIHMLLATS | | |
| | | SRFRMMNLQGEEFVCLKSIILLNSGVYTFLSSTLKSLEE | | |
| | | KDHIHRVLDKITDTLIHLMAKAGLTLQQQHQRLAQLL | | |
| | | LILSHIRHMSNKRMEHLYSMKCKNVVPLSDLLLEMLD | | |
| | | AHRL* | | |
| OT-001693 | IL12B (p40) | MCHQQLVISWFSLVFLASPLVAIWELKKDVYVVELD | 190 | 191 |
| | signal | WYPDAPGEMVVLTCDTPEEDGITWTLDQSSEVLGSGK | | |
| | sequence; | TLTIQVKEFGDAGQYTCHKGGEVLSHSLLLLHKKEDG | | |
| | IL12B (p40) | IWSTDILKDQKEPKNKTFLRCEAKNYSGRFTCWWLTT | | |
| | (23-328 of | ISTDLTFSVKSSRGSSDPQGVTCGAATLSAERVRGDNK | | |
| | WT); Linker | EYEYSVECQEDSACPAAEESLPIEVMVDAVHKLKYEN | | |
| | ((G4S)3; IL12A | YTSSFFIRDIIKPDPPKNLQLKPLKNSRQVEVSWEYPDT | | |
| | (p35) (57-253 | WSTPHSYFSLTFCVQVQGKSKREKKDRVFTDKTSATV | | |
| | of WT); Linker | ICRKNASISVRAQDRYYSSSWSEWASVPCSGGGGSGG | | |
| | (GS); ER (aa | GGSGGGGSRNLPVATPDPGMFPCLHHSQNLLRAVSN | | |
| | 305-549 of WT, | MLQKARQTLEFYPCTSEEIDHEDITKDKTSTVEACLPL | | |
| | L384M, | ELTKNESCLNSRETSFITNGSCLASRKTSFMMALCLSSI | | |
| | N413P, | YEDLKMYQVEFKTMNAKLLMDPKRQIFLDQNMLAVI | | |
| | M421G, | DELMQALNFNSETVPQKSSLEEPDFYKTKIKLCILLHA | | |
| | G521R, | FRIRAVTIDRVMSYLNASGSSLALSLTADQMVSALLD | | |
| | Y537S); stop | AEPPILYSEYDPTRPFSEASMMGLLTNLADRELVHMIN | | |
| | | WAKRVPGFVDLTLHDQVHLLECAWMEILMIGLVWRS | | |
| | | MEHPGKLLFAPNLLLDRPQGKCVEGGVEIHMLLATS | | |
| | | SRFRMMNLQGEEFVCLKSIILLNSGVYTFLSSTLKSLEE | | |
| | | KDHIHRVLDKITDTLIHLMAKAGLTLQQQHQRLAQLL | | |
| | | LILSHIRHMSNKRMEHLYSMKCKNVVPLSDLLLEMLD | | |
| | | AHRL* | | |
| OT-001692 | IL12B (p40) | MCHQQLVISWFSLVFLASPLVAIWELKKDVYVVELD | 192 | 193 |
| | signal | WYPDAPGEMVVLTCDTPEEDGITWTLDQSSEVLGSGK | | |
| | sequence; | TLTIQVKEFGDAGQYTCHKGGEVLSHSLLLLHKKEDG | | |
| | IL12B (p40) | IWSTDILKDQKEPKNKTFLRCEAKNYSGRFTCWWLTT | | |
| | (23-328 of | ISTDLTFSVKSSRGSSDPQGVTCGAATLSAERVRGDNK | | |
| | WT); Linker | EYEYSVECQEDSACPAAEESLPIEVMVDAVHKLKYEN | | |
| | ((G4S)3; IL12A | YTSSFFIRDIIKPDPPKNLQLKPLKNSRQVEVSWEYPDT | | |
| | (p35) (57-253 | WSTPHSYFSLTFCVQVQGKSKREKKDRVFTDKTSATV | | |
| | of WT); Linker | ICRKNASISVRAQDRYYSSSWSEWASVPCSGGGGSGG | | |
| | (GS); ER (aa | GGSGGGGSRNLPVATPDPGMFPCLHHSQNLLRAVSN | | |
| | 305-549 of WT, | MLQKARQTLEFYPCTSEEIDHEDITKDKTSTVEACLPL | | |
| | L384M, | ELTKNESCLNSRETSFITNGSCLASRKTSFMMALCLSSI | | |
| | N413R, | YEDLKMYQVEFKTMNAKLLMDPKRQIFLDQNMLAVI | | |
| | M421G, | DELMQALNFNSETVPQKSSLEEPDFYKTKIKLCILLHA | | |
| | G521R, | FRIRAVTIDRVMSYLNASGSSLALSLTADQMVSALLD | | |
| | Y537S); stop | AEPPILYSEYDPTRPFSEASMMGLLTNLADRELVHMIN | | |
| | | WAKRVPGFVDLTLHDQVHLLECAWMEILMIGLVWRS | | |
| | | MEHPGKLLFAPNLLLDRRQGKCVEGGVEIFDMLLATS | | |
| | | SRFRMMNLQGEEFVCLKSIILLNSGVYTFLSSTLKSLEE | | |
| | | KDHIHRVLDKITDTLIHLMAKAGLTLQQQHQRLAQLL | | |
| | | LILSHIRHMSNKRMEHLYSMKCKNVVPLSDLLLEMLD | | |
| | | AHRL* | | |
| OT-001691 | IL12B (p40) | MCHQQLVISWFSLVFLASPLVAIWELKKDVYVVELD | 194 | 195 |
| | signal | WYPDAPGEMVVLTCDTPEEDGITWTLDQSSEVLGSGK | | |
| | sequence; | TLTIQVKEFGDAGQYTCHKGGEVLSHSLLLLHKKEDG | | |
| | IL12B (p40) | IWSTDILKDQKEPKNKTFLRCEAKNYSGRFTCWWLTT | | |
| | (23-328 of | ISTDLTFSVKSSRGSSDPQGVTCGAATLSAERVRGDNK | | |
| | WT); Linker | EYEYSVECQEDSACPAAEESLPIEVMVDAVHKLKYEN | | |
| | ((G4S)3; IL12A | YTSSFFIRDIIKPDPPKNLQLKPLKNSRQVEVSWEYPDT | | |
| | (p35) (57-253 | WSTPHSYFSLTFCVQVQGKSKREKKDRVFTDKTSATV | | |
| | of WT); Linker | ICRKNASISVRAQDRYYSSSWSEWASVPCSGGGGSGG | | |
| | (GS); ER (aa | GGSGGGGSRNLPVATPDPGMFPCLHHSQNLLRAVSN | | |
| | 305-549 of WT, | MLQKARQTLEFYPCTSEEIDHEDITKDKTSTVEACLPL | | |
| | L384M, | ELTKNESCLNSRETSFITNGSCLASRKTSFMMALCLSSI | | |
| | N413T, | YEDLKMYQVEFKTMNAKLLMDPKRQIFLDQNMLAVI | | |
| | M421G, | DELMQALNFNSETVPQKSSLEEPDFYKTKIKLCILLHA | | |
| | G521R, | FRIRAVTIDRVMSYLNASGSSLALSLTADQMVSALLD | | |
| | Y537S); stop | AEPPILYSEYDPTRPFSEASMMGLLTNLADRELVHMIN | | |
| | | WAKRVPGFVDLTLHDQVHLLECAWMEILMIGLVWRS | | |
| | | MEHPGKLLFAPNLLLDRTQGKCVEGGVEIFDMLLATS | | |
| | | SRFRMMNLQGEEFVCLKSIILLNSGVYTFLSSTLKSLEE | | |
| | | KDHIHRVLDKITDTLIHLMAKAGLTLQQQHQRLAQLL | | |
| | | LILSHIRHMSNKRMEHLYSMKCKNVVPLSDLLLEMLD | | |
| | | AHRL* | | |
| OT-001690 | IL12B (p40) | MCHQQLVISWFSLVFLASPLVAIWELKKDVYVVELD | 196 | 197 |
| | signal | WYPDAPGEMVVLTCDTPEEDGITWTLDQSSEVLGSGK | | |
| | sequence; | TLTIQVKEFGDAGQYTCHKGGEVLSHSLLLLHKKEDG | | |
| | IL12B (p40) | IWSTDILKDQKEPKNKTFLRCEAKNYSGRFTCWWLTT | | |
| | (23-328 of | ISTDLTFSVKSSRGSSDPQGVTCGAATLSAERVRGDNK | | |
| | WT); Linker | EYEYSVECQEDSACPAAEESLPIEVMVDAVHKLKYEN | | |
| | ((G4S)3; IL12A | YTSSFFIRDIIKPDPPKNLQLKPLKNSRQVEVSWEYPDT | | |
| | (p35) (57-253 | WSTPHSYFSLTFCVQVQGKSKREKKDRVFTDKTSATV | | |
| | of WT); Linker | ICRKNASISVRAQDRYYSSSWSEWASVPCSGGGGSGG | | |
| | (GS); ER (aa | GGSGGGGSRNLPVATPDPGMFPCLHHSQNLLRAVSN | | |
| | 305-549 of WT, | MLQKARQTLEFYPCTSEEIDHEDITKDKTSTVEACLPL | | |
| | L384M, | ELTKNESCLNSRETSFITNGSCLASRKTSFMMALCLSSI | | |
| | N413A, | YEDLKMYQVEFKTMNAKLLMDPKRQIFLDQNMLAVI | | |
| | M421G, | DELMQALNFNSETVPQKSSLEEPDFYKTKIKLCILLHA | | |
| | G521R, | FRIRAVTIDRVMSYLNASGSSLALSLTADQMVSALLD | | |
| | Y537S); stop | AEPPILYSEYDPTRPFSEASMMGLLTNLADRELVHMIN | | |
| | | WAKRVPGFVDLTLHDQVHLLECAWMEILMIGLVWRS | | |
| | | MEHPGKLLFAPNLLLDRAQGKCVEGGVEIFDMLLATS | | |
| | | SRFRMMNLQGEEFVCLKSIILLNSGVYTFLSSTLKSLEE | | |
| | | KDHIHRVLDKITDTLIHLMAKAGLTLQQQHQRLAQLL | | |
| | | LILSHIRHMSNKRMEHLYSMKCKNVVPLSDLLLEMLD | | |
| | | AHRL* | | |
| OT-001689 | IL12B (p40) | MCHQQLVISWFSLVFLASPLVAIWELKKDVYVVELD | 198 | 199 |
| | signal | WYPDAPGEMVVLTCDTPEEDGITWTLDQSSEVLGSGK | | |
| | sequence; | TLTIQVKEFGDAGQYTCHKGGEVLSHSLLLLHKKEDG | | |
| | IL12B (p40) | IWSTDILKDQKEPKNKTFLRCEAKNYSGRFTCWWLTT | | |
| | (23-328 of | ISTDLTFSVKSSRGSSDPQGVTCGAATLSAERVRGDNK | | |
| | WT); Linker | EYEYSVECQEDSACPAAEESLPIEVMVDAVHKLKYEN | | |
| | ((G4S)3; IL12A | YTSSFFIRDIIKPDPPKNLQLKPLKNSRQVEVSWEYPDT | | |
| | (p35) (57-253 | WSTPHSYFSLTFCVQVQGKSKREKKDRVFTDKTSATV | | |
| | of WT); Linker | ICRKNASISVRAQDRYYSSSWSEWASVPCSGGGGSGG | | |
| | (GS); ER (aa | GGSGGGGSRNLPVATPDPGMFPCLHHSQNLLRAVSN | | |
| | 305-549 of WT, | MLQKARQTLEFYPCTSEEIDHEDITKDKTSTVEACLPL | | |
| | L384M, | ELTKNESCLNSRETSFITNGSCLASRKTSFMMALCLSSI | | |
| | N413E, | YEDLKMYQVEFKTMNAKLLMDPKRQIFLDQNMLAVI | | |
| | M421G, | DELMQALNFNSETVPQKSSLEEPDFYKTKIKLCILLHA | | |
| | G521R, | FRIRAVTIDRVMSYLNASGSSLALSLTADQMVSALLD | | |
| | Y537S); stop | AEPPILYSEYDPTRPFSEASMMGLLTNLADRELVHMIN | | |
| | | WAKRVPGFVDLTLHDQVHLLECAWMEILMIGLVWRS | | |
| | | MEHPGKLLFAPNLLLDREQGKCVEGGVEIFDMLLATS | | |
| | | SRFRMMNLQGEEFVCLKSIILLNSGVYTFLSSTLKSLEE | | |
| | | KDHIHRVLDKITDTLIHLMAKAGLTLQQQHQRLAQLL | | |
| | | LILSHIRHMSNKRMEHLYSMKCKNVVPLSDLLLEMLD | | |
| | | AHRL* | | |
| OT-001688 | IL12B (p40) | MCHQQLVISWFSLVFLASPLVAIWELKKDVYVVELD | 200 | 201 |
| | signal | WYPDAPGEMVVLTCDTPEEDGITWTLDQSSEVLGSGK | | |
| | sequence; | TLTIQVKEFGDAGQYTCHKGGEVLSHSLLLLHKKEDG | | |
| | IL12B (p40) | IWSTDILKDQKEPKNKTFLRCEAKNYSGRFTCWWLTT | | |
| | (23-328 of | ISTDLTFSVKSSRGSSDPQGVTCGAATLSAERVRGDNK | | |
| | WT); Linker | EYEYSVECQEDSACPAAEESLPIEVMVDAVHKLKYEN | | |
| | ((G4S)3; IL12A | YTSSFFIRDIIKPDPPKNLQLKPLKNSRQVEVSWEYPDT | | |
| | (p35) (57-253 | WSTPHSYFSLTFCVQVQGKSKREKKDRVFTDKTSATV | | |
| | of WT); Linker | ICRKNASISVRAQDRYYSSSWSEWASVPCSGGGGSGG | | |
| | (GS); ER (aa | GGSGGGGSRNLPVATPDPGMFPCLHHSQNLLRAVSN | | |
| | 305-549 of WT, | MLQKARQTLEFYPCTSEEIDHEDITKDKTSTVEACLPL | | |
| | L384M, | ELTKNESCLNSRETSFITNGSCLASRKTSFMMALCLSSI | | |
| | N413G, | YEDLKMYQVEFKTMNAKLLMDPKRQIFLDQNMLAVI | | |
| | M421G, | DELMQALNFNSETVPQKSSLEEPDFYKTKIKLCILLHA | | |
| | G521R, | FRIRAVTIDRVMSYLNASGSSLALSLTADQMVSALLD | | |
| | Y537S); stop | AEPPILYSEYDPTRPFSEASMMGLLTNLADRELVHMIN | | |
| | | WAKRVPGFVDLTLHDQVHLLECAWMEILMIGLVWRS | | |
| | | MEHPGKLLFAPNLLLDRGQGKCVEGGVEIFDMLLATS | | |
| | | SRFRMMNLQGEEFVCLKSIILLNSGVYTFLSSTLKSLEE | | |
| | | KDHIHRVLDKITDTLIHLMAKAGLTLQQQHQRLAQLL | | |
| | | LILSHIRHMSNKRMEHLYSMKCKNVVPLSDLLLEMLD | | |
| | | AHRL* | | |
| OT-001726 | IL12B (p40) | MCHQQLVISWFSLVFLASPLVAIWELKKDVYVVELD | 202 | 203 |
| | signal | WYPDAPGEMVVLTCDTPEEDGITWTLDQSSEVLGSGK | | |
| | sequence; | TLTIQVKEFGDAGQYTCHKGGEVLSHSLLLLHKKEDG | | |
| | IL12B (p40) | IWSTDILKDQKEPKNKTFLRCEAKNYSGRFTCWWLTT | | |
| | (23-328 of | ISTDLTFSVKSSRGSSDPQGVTCGAATLSAERVRGDNK | | |
| | WT); Linker | EYEYSVECQEDSACPAAEESLPIEVMVDAVHKLKYEN | | |
| | ((G4S)3; IL12A | YTSSFFIRDIIKPDPPKNLQLKPLKNSRQVEVSWEYPDT | | |
| | (p35) (57-253 | WSTPHSYFSLTFCVQVQGKSKREKKDRVFTDKTSATV | | |
| | of WT); Linker | ICRKNASISVRAQDRYYSSSWSEWASVPCSGGGGSGG | | |
| | (GS); ER (aa | GGSGGGGSRNLPVATPDPGMFPCLHHSQNLLRAVSN | | |
| | 305-549 of WT, | MLQKARQTLEFYPCTSEEIDHEDITKDKTSTVEACLPL | | |
| | L384M, | ELTKNESCLNSRETSFITNGSCLASRKTSFMMALCLSSI | | |
| | M421G, | YEDLKMYQVEFKTMNAKLLMDPKRQIFLDQNMLAVI | | |
| | Q502F, G521R, | DELMQALNFNSETVPQKSSLEEPDFYKTKIKLCILLHA | | |
| | Y537S); stop | FRIRAVTIDRVMSYLNASGSSLALSLTADQMVSALLD | | |
| | | AEPPILYSEYDPTRPFSEASMMGLLTNLADRELVHMIN | | |
| | | WAKRVPGFVDLTLHDQVHLLECAWMEILMIGLVWRS | | |
| | | MEHPGKLLFAPNLLLDRNQGKCVEGGVEIFDMLLATS | | |
| | | SRFRMMNLQGEEFVCLKSIILLNSGVYTFLSSTLKSLEE | | |
| | | KDHIHRVLDKITDTLIHLMAKAGLTLQQQHFRLAQLL | | |
| | | LILSHIRHMSNKRMEHLYSMKCKNVVPLSDLLLEMLD | | |
| | | AHRL* | | |
| OT-001725 | IL12B (p40) | MCHQQLVISWFSLVFLASPLVAIWELKKDVYVVELD | 204 | 205 |
| | signal | WYPDAPGEMVVLTCDTPEEDGITWTLDQSSEVLGSGK | | |
| | sequence; | TLTIQVKEFGDAGQYTCHKGGEVLSHSLLLLHKKEDG | | |
| | IL12B (p40) | IWSTDILKDQKEPKNKTFLRCEAKNYSGRFTCWWLTT | | |
| | (23-328 of | ISTDLTFSVKSSRGSSDPQGVTCGAATLSAERVRGDNK | | |
| | WT); Linker | EYEYSVECQEDSACPAAEESLPIEVMVDAVHKLKYEN | | |
| | ((G4S)3; IL12A | YTSSFFIRDIIKPDPPKNLQLKPLKNSRQVEVSWEYPDT | | |
| | (p35) (57-253 | WSTPHSYFSLTFCVQVQGKSKREKKDRVFTDKTSATV | | |
| | of WT); Linker | ICRKNASISVRAQDRYYSSSWSEWASVPCSGGGGSGG | | |
| | (GS); ER (aa | GGSGGGGSRNLPVATPDPGMFPCLHHSQNLLRAVSN | | |
| | 305-549 of WT, | MLQKARQTLEFYPCTSEEIDHEDITKDKTSTVEACLPL | | |
| | L384M, | ELTKNESCLNSRETSFITNGSCLASRKTSFMMALCLSSI | | |
| | M421G, | YEDLKMYQVEFKTMNAKLLMDPKRQIFLDQNMLAVI | | |
| | Q502L, G521R, | DELMQALNFNSETVPQKSSLEEPDFYKTKIKLCILLHA | | |
| | Y537S); stop | FRIRAVTIDRVMSYLNASGSSLALSLTADQMVSALLD | | |
| | | AEPPILYSEYDPTRPFSEASMMGLLTNLADRELVHMIN | | |
| | | WAKRVPGFVDLTLHDQVHLLECAWMEILMIGLVWRS | | |
| | | MEHPGKLLFAPNLLLDRNQGKCVEGGVEIHMLLATS | | |
| | | SRFRMMNLQGEEFVCLKSIILLNSGVYTFLSSTLKSLEE | | |
| | | KDHIHRVLDKITDTLIHLMAKAGLTLQQQHLRLAQLL | | |
| | | LILSHIRHMSNKRMEHLYSMKCKNVVPLSDLLLEMLD | | |
| | | AHRL* | | |
| OT-001724 | IL12B (p40) | MCHQQLVISWFSLVFLASPLVAIWELKKDVYVVELD | 206 | 207 |
| | signal | WYPDAPGEMVVLTCDTPEEDGITWTLDQSSEVLGSGK | | |
| | sequence; | TLTIQVKEFGDAGQYTCHKGGEVLSHSLLLLHKKEDG | | |
| | IL12B (p40) | IWSTDILKDQKEPKNKTFLRCEAKNYSGRFTCWWLTT | | |
| | (23-328 of | ISTDLTFSVKSSRGSSDPQGVTCGAATLSAERVRGDNK | | |
| | WT); Linker | EYEYSVECQEDSACPAAEESLPIEVMVDAVHKLKYEN | | |
| | ((G4S)3; IL12A | YTSSFFIRDIIKPDPPKNLQLKPLKNSRQVEVSWEYPDT | | |
| | (p35) (57-253 | WSTPHSYFSLTFCVQVQGKSKREKKDRVFTDKTSATV | | |
| | of WT); Linker | ICRKNASISVRAQDRYYSSSWSEWASVPCSGGGGSGG | | |
| | (GS); ER (aa | GGSGGGGSRNLPVATPDPGMFPCLHHSQNLLRAVSN | | |
| | 305-549 of WT, | MLQKARQTLEFYPCTSEEIDHEDITKDKTSTVEACLPL | | |
| | L384M, | ELTKNESCLNSRETSFITNGSCLASRKTSFMMALCLSSI | | |
| | M421G, | YEDLKMYQVEFKTMNAKLLMDPKRQIFLDQNMLAVI | | |
| | Q502Y, | DELMQALNFNSETVPQKSSLEEPDFYKTKIKLCILLHA | | |
| | G521R, | FRIRAVTIDRVMSYLNASGSSLALSLTADQMVSALLD | | |
| | Y537S); stop | AEPPILYSEYDPTRPFSEASMMGLLTNLADRELVHMIN | | |
| | | WAKRVPGFVDLTLHDQVHLLECAWMEILMIGLVWRS | | |
| | | MEHPGKLLFAPNLLLDRNQGKCVEGGVEIHMLLATS | | |
| | | SRFRMMNLQGEEFVCLKSIILLNSGVYTFLSSTLKSLEE | | |
| | | KDHIHRVLDKITDTLIHLMAKAGLTLQQQHYRLAQLL | | |
| | | LILSHIRHMSNKRMEHLYSMKCKNVVPLSDLLLEMLD | | |
| | | AHRL* | | |
| OT-001723 | IL12B (p40) | MCHQQLVISWFSLVFLASPLVAIWELKKDVYVVELD | 208 | 209 |
| | signal | WYPDAPGEMVVLTCDTPEEDGITWTLDQSSEVLGSGK | | |
| | sequence; | TLTIQVKEFGDAGQYTCHKGGEVLSHSLLLLHKKEDG | | |
| | IL12B (p40) | IWSTDILKDQKEPKNKTFLRCEAKNYSGRFTCWWLTT | | |
| | (23-328 of | ISTDLTFSVKSSRGSSDPQGVTCGAATLSAERVRGDNK | | |
| | WT); Linker | EYEYSVECQEDSACPAAEESLPIEVMVDAVHKLKYEN | | |
| | ((G4S)3; IL12A | YTSSFFIRDIIKPDPPKNLQLKPLKNSRQVEVSWEYPDT | | |
| | (p35) (57-253 | WSTPHSYFSLTFCVQVQGKSKREKKDRVFTDKTSATV | | |
| | of WT); Linker | ICRKNASISVRAQDRYYSSSWSEWASVPCSGGGGSGG | | |
| | (GS); ER (aa | GGSGGGGSRNLPVATPDPGMFPCLHHSQNLLRAVSN | | |
| | 305-549 of WT, | MLQKARQTLEFYPCTSEEIDHEDITKDKTSTVEACLPL | | |
| | L384M, | ELTKNESCLNSRETSFITNGSCLASRKTSFMMALCLSSI | | |
| | M421G, | YEDLKMYQVEFKTMNAKLLMDPKRQIFLDQNMLAVI | | |
| | Q502H, | DELMQALNFNSETVPQKSSLEEPDFYKTKIKLCILLHA | | |
| | G521R, | FRIRAVTIDRVMSYLNASGSSLALSLTADQMVSALLD | | |
| | Y537S); stop | AEPPILYSEYDPTRPFSEASMMGLLTNLADRELVHMIN | | |
| | | WAKRVPGFVDLTLHDQVHLLECAWMEILMIGLVWRS | | |
| | | MEHPGKLLFAPNLLLDRNQGKCVEGGVEIFDMLLATS | | |
| | | SRFRMMNLQGEEFVCLKSIILLNSGVYTFLSSTLKSLEE | | |
| | | KDHIHRVLDKITDTLIHLMAKAGLTLQQQHHRLAQLL | | |
| | | LILSHIRHMSNKRMEHLYSMKCKNVVPLSDLLLEMLD | | |
| | | AHRL* | | |
| OT-001722 | IL12B (p40) | MCHQQLVISWFSLVFLASPLVAIWELKKDVYVVELD | 210 | 211 |
| | signal | WYPDAPGEMVVLTCDTPEEDGITWTLDQSSEVLGSGK | | |
| | sequence; | TLTIQVKEFGDAGQYTCHKGGEVLSHSLLLLHKKEDG | | |
| | IL12B (p40) | IWSTDILKDQKEPKNKTFLRCEAKNYSGRFTCWWLTT | | |
| | (23-328 of | ISTDLTFSVKSSRGSSDPQGVTCGAATLSAERVRGDNK | | |
| | WT); Linker | EYEYSVECQEDSACPAAEESLPIEVMVDAVHKLKYEN | | |
| | ((G4S)3; IL12A | YTSSFFIRDIIKPDPPKNLQLKPLKNSRQVEVSWEYPDT | | |
| | (p35) (57-253 | WSTPHSYFSLTFCVQVQGKSKREKKDRVFTDKTSATV | | |
| | of WT); Linker | ICRKNASISVRAQDRYYSSSWSEWASVPCSGGGGSGG | | |
| | (GS); ER (aa | GGSGGGGSRNLPVATPDPGMFPCLHHSQNLLRAVSN | | |
| | 305-549 of WT, | MLQKARQTLEFYPCTSEEIDHEDITKDKTSTVEACLPL | | |
| | L384M, | ELTKNESCLNSRETSFITNGSCLASRKTSFMMALCLSSI | | |
| | M421G, Q5021, | YEDLKMYQVEFKTMNAKLLMDPKRQIFLDQNMLAVI | | |
| | G521R, | DELMQALNFNSETVPQKSSLEEPDFYKTKIKLCILLHA | | |
| | Y537S); stop | FRIRAVTIDRVMSYLNASGSSLALSLTADQMVSALLD | | |
| | | AEPPILYSEYDPTRPFSEASMMGLLTNLADRELVHMIN | | |
| | | WAKRVPGFVDLTLHDQVHLLECAWMEILMIGLVWRS | | |
| | | MEHPGKLLFAPNLLLDRNQGKCVEGGVEIFDMLLATS | | |
| | | SRFRMMNLQGEEFVCLKSIILLNSGVYTFLSSTLKSLEE | | |
| | | KDHIHRVLDKITDTLIHLMAKAGLTLQQQHIRLAQLLL | | |
| | | ILSHIRHMSNKRMEHLYSMKCKNVVPLSDLLLEMLDA | | |
| | | HRL* | | |
| OT-001721 | IL12B (p40) | MCHQQLVISWFSLVFLASPLVAIWELKKDVYVVELD | 212 | 213 |
| | signal | WYPDAPGEMVVLTCDTPEEDGITWTLDQSSEVLGSGK | | |
| | sequence; | TLTIQVKEFGDAGQYTCHKGGEVLSHSLLLLHKKEDG | | |
| | IL12B (p40) | IWSTDILKDQKEPKNKTFLRCEAKNYSGRFTCWWLTT | | |
| | (23-328 of | ISTDLTFSVKSSRGSSDPQGVTCGAATLSAERVRGDNK | | |
| | WT); Linker | EYEYSVECQEDSACPAAEESLPIEVMVDAVHKLKYEN | | |
| | ((G4S)3; IL12A | YTSSFFIRDIIKPDPPKNLQLKPLKNSRQVEVSWEYPDT | | |
| | (p35) (57-253 | WSTPHSYFSLTFCVQVQGKSKREKKDRVFTDKTSATV | | |
| | of WT); Linker | ICRKNASISVRAQDRYYSSSWSEWASVPCSGGGGSGG | | |
| | (GS); ER (aa | GGSGGGGSRNLPVATPDPGMFPCLHHSQNLLRAVSN | | |
| | 305-549 of WT, | MLQKARQTLEFYPCTSEEIDHEDITKDKTSTVEACLPL | | |
| | L384M, | ELTKNESCLNSRETSFITNGSCLASRKTSFMMALCLSSI | | |
| | M421G, | YEDLKMYQVEFKTMNAKLLMDPKRQIFLDQNMLAVI | | |
| | Q502M, | DELMQALNFNSETVPQKSSLEEPDFYKTKIKLCILLHA | | |
| | G521R, | FRIRAVTIDRVMSYLNASGSSLALSLTADQMVSALLD | | |
| | Y537S); stop | AEPPILYSEYDPTRPFSEASMMGLLTNLADRELVHMIN | | |
| | | WAKRVPGFVDLTLHDQVHLLECAWMEILMIGLVWRS | | |
| | | MEHPGKLLFAPNLLLDRNQGKCVEGGVEIFDMLLATS | | |
| | | SRFRMMNLQGEEFVCLKSIILLNSGVYTFLSSTLKSLEE | | |
| | | KDHIHRVLDKITDTLIHLMAKAGLTLQQQHMRLAQLL | | |
| | | LILSHIRHMSNKRMEHLYSMKCKNVVPLSDLLLEMLD | | |
| | | AHRL* | | |
| OT-001720 | IL12B (p40) | MCHQQLVISWFSLVFLASPLVAIWELKKDVYVVELD | 214 | 215 |
| | signal | WYPDAPGEMVVLTCDTPEEDGITWTLDQSSEVLGSGK | | |
| | sequence; | TLTIQVKEFGDAGQYTCHKGGEVLSHSLLLLHKKEDG | | |
| | IL12B (p40) | IWSTDILKDQKEPKNKTFLRCEAKNYSGRFTCWWLTT | | |
| | (23-328 of | ISTDLTFSVKSSRGSSDPQGVTCGAATLSAERVRGDNK | | |
| | WT); Linker | EYEYSVECQEDSACPAAEESLPIEVMVDAVHKLKYEN | | |
| | ((G4S)3 ; IL12A | YTSSFFIRDIIKPDPPKNLQLKPLKNSRQVEVSWEYPDT | | |
| | (p35) (57-253 | WSTPHSYFSLTFCVQVQGKSKREKKDRVFTDKTSATV | | |
| | of WT); Linker | ICRKNASISVRAQDRYYSSSWSEWASVPCSGGGGSGG | | |
| | (GS); ER (aa | GGSGGGGSRNLPVATPDPGMFPCLHHSQNLLRAVSN | | |
| | 305-549 of WT, | MLQKARQTLEFYPCTSEEIDHEDITKDKTSTVEACLPL | | |
| | L384M, | ELTKNESCLNSRETSFITNGSCLASRKTSFMMALCLSSI | | |
| | M421G, | YEDLKMYQVEFKTMNAKLLMDPKRQIFLDQNMLAVI | | |
| | Q502N, | DELMQALNFNSETVPQKSSLEEPDFYKTKIKLCILLHA | | |
| | G521R, | FRIRAVTIDRVMSYLNASGSSLALSLTADQMVSALLD | | |
| | Y537S); stop | AEPPILYSEYDPTRPFSEASMMGLLTNLADRELVHMIN | | |
| | | WAKRVPGFVDLTLHDQVHLLECAWMEILMIGLVWRS | | |
| | | MEHPGKLLFAPNLLLDRNQGKCVEGGVEIFDMLLATS | | |
| | | SRFRMMNLQGEEFVCLKSIILLNSGVYTFLSSTLKSLEE | | |
| | | KDHIHRVLDKITDTLIHLMAKAGLTLQQQHNRLAQLL | | |
| | | LILSHIRHMSNKRMEHLYSMKCKNVVPLSDLLLEMLD | | |
| | | AHRL* | | |
| OT-001719 | IL12B (p40) | MCHQQLVISWFSLVFLASPLVAIWELKKDVYVVELD | 216 | 217 |
| | signal | WYPDAPGEMVVLTCDTPEEDGITWTLDQSSEVLGSGK | | |
| | sequence; | TLTIQVKEFGDAGQYTCHKGGEVLSHSLLLLHKKEDG | | |
| | IL12B (p40) | IWSTDILKDQKEPKNKTFLRCEAKNYSGRFTCWWLTT | | |
| | (23-328 of | ISTDLTFSVKSSRGSSDPQGVTCGAATLSAERVRGDNK | | |
| | WT); Linker | EYEYSVECQEDSACPAAEESLPIEVMVDAVHKLKYEN | | |
| | ((G4S)3; IL12A | YTSSFFIRDIIKPDPPKNLQLKPLKNSRQVEVSWEYPDT | | |
| | (p35) (57-253 | WSTPHSYFSLTFCVQVQGKSKREKKDRVFTDKTSATV | | |
| | of WT); Linker | ICRKNASISVRAQDRYYSSSWSEWASVPCSGGGGSGG | | |
| | (GS); ER (aa | GGSGGGGSRNLPVATPDPGMFPCLHHSQNLLRAVSN | | |
| | 305-549 of WT, | MLQKARQTLEFYPCTSEEIDHEDITKDKTSTVEACLPL | | |
| | L384M, | ELTKNESCLNSRETSFITNGSCLASRKTSFMMALCLSSI | | |
| | M421G, | YEDLKMYQVEFKTMNAKLLMDPKRQIFLDQNMLAVI | | |
| | Q502K, | DELMQALNFNSETVPQKSSLEEPDFYKTKIKLCILLHA | | |
| | G521R, | FRIRAVTIDRVMSYLNASGSSLALSLTADQMVSALLD | | |
| | Y537S); stop | AEPPILYSEYDPTRPFSEASMMGLLTNLADRELVHMIN | | |
| | | WAKRVPGFVDLTLHDQVHLLECAWMEILMIGLVWRS | | |
| | | MEHPGKLLFAPNLLLDRNQGKCVEGGVEIFDMLLATS | | |
| | | SRFRMMNLQGEEFVCLKSIILLNSGVYTFLSSTLKSLEE | | |
| | | KDHIHRVLDKITDTLIHLMAKAGLTLQQQHKRLAQLL | | |
| | | LILSHIRHMSNKRMEHLYSMKCKNVVPLSDLLLEMLD | | |
| | | AHRL* | | |
| OT-001718 | IL12B (p40) | MCHQQLVISWFSLVFLASPLVAIWELKKDVYVVELD | 218 | 219 |
| | signal | WYPDAPGEMVVLTCDTPEEDGITWTLDQSSEVLGSGK | | |
| | sequence; | TLTIQVKEFGDAGQYTCHKGGEVLSHSLLLLHKKEDG | | |
| | IL12B (p40) | IWSTDILKDQKEPKNKTFLRCEAKNYSGRFTCWWLTT | | |
| | (23-328 of | ISTDLTFSVKSSRGSSDPQGVTCGAATLSAERVRGDNK | | |
| | WT); Linker | EYEYSVECQEDSACPAAEESLPIEVMVDAVHKLKYEN | | |
| | ((G4S)3 ; IL12A | YTSSFFIRDIIKPDPPKNLQLKPLKNSRQVEVSWEYPDT | | |
| | (p35) (57-253 | WSTPHSYFSLTFCVQVQGKSKREKKDRVFTDKTSATV | | |
| | of WT); Linker | ICRKNASISVRAQDRYYSSSWSEWASVPCSGGGGSGG | | |
| | (GS); ER (aa | GGSGGGGSRNLPVATPDPGMFPCLHHSQNLLRAVSN | | |
| | 305-549 of WT, | MLQKARQTLEFYPCTSEEIDHEDITKDKTSTVEACLPL | | |
| | L384M, | ELTKNESCLNSRETSFITNGSCLASRKTSFMMALCLSSI | | |
| | M421G, | YEDLKMYQVEFKTMNAKLLMDPKRQIFLDQNMLAVI | | |
| | Q502V, | DELMQALNFNSETVPQKSSLEEPDFYKTKIKLCILLHA | | |
| | G521R, | FRIRAVTIDRVMSYLNASGSSLALSLTADQMVSALLD | | |
| | Y537S); stop | AEPPILYSEYDPTRPFSEASMMGLLTNLADRELVHMIN | | |
| | | WAKRVPGFVDLTLHDQVHLLECAWMEILMIGLVWRS | | |
| | | MEHPGKLLFAPNLLLDRNQGKCVEGGVEIFDMLLATS | | |
| | | SRFRMMNLQGEEFVCLKSIILLNSGVYTFLSSTLKSLEE | | |
| | | KDHIHRVLDKITDTLIHLMAKAGLTLQQQHVRLAQLL | | |
| | | LILSHIRHMSNKRMEHLYSMKCKNVVPLSDLLLEMLD | | |
| | | AHRL* | | |
| OT-001717 | IL12B (p40) | MCHQQLVISWFSLVFLASPLVAIWELKKDVYVVELD | 220 | 221 |
| | signal | WYPDAPGEMVVLTCDTPEEDGITWTLDQSSEVLGSGK | | |
| | sequence; | TLTIQVKEFGDAGQYTCHKGGEVLSHSLLLLHKKEDG | | |
| | IL12B (p40) | IWSTDILKDQKEPKNKTFLRCEAKNYSGRFTCWWLTT | | |
| | (23-328 of | ISTDLTFSVKSSRGSSDPQGVTCGAATLSAERVRGDNK | | |
| | WT); Linker | EYEYSVECQEDSACPAAEESLPIEVMVDAVHKLKYEN | | |
| | ((G4S)3; IL12A | YTSSFFIRDIIKPDPPKNLQLKPLKNSRQVEVSWEYPDT | | |
| | (p35) (57-253 | WSTPHSYFSLTFCVQVQGKSKREKKDRVFTDKTSATV | | |
| | of WT); Linker | ICRKNASISVRAQDRYYSSSWSEWASVPCSGGGGSGG | | |
| | (GS); ER (aa | GGSGGGGSRNLPVATPDPGMFPCLHHSQNLLRAVSN | | |
| | 305-549 of WT, | MLQKARQTLEFYPCTSEEIDHEDITKDKTSTVEACLPL | | |
| | L384M, | ELTKNESCLNSRETSFITNGSCLASRKTSFMMALCLSSI | | |
| | M421G, | YEDLKMYQVEFKTMNAKLLMDPKRQIFLDQNMLAVI | | |
| | Q502S , G521R, | DELMQALNFNSETVPQKSSLEEPDFYKTKIKLCILLHA | | |
| | Y537S); stop | FRIRAVTIDRVMSYLNASGSSLALSLTADQMVSALLD | | |
| | | AEPPILYSEYDPTRPFSEASMMGLLTNLADRELVHMIN | | |
| | | WAKRVPGFVDLTLHDQVHLLECAWMEILMIGLVWRS | | |
| | | MEHPGKLLFAPNLLLDRNQGKCVEGGVEIHMLLATS | | |
| | | SRFRMMNLQGEEFVCLKSIILLNSGVYTFLSSTLKSLEE | | |
| | | KDHIHRVLDKITDTLIHLMAKAGLTLQQQHSRLAQLL | | |
| | | LILSHIRHMSNKRMEHLYSMKCKNVVPLSDLLLEMLD | | |
| | | AHRL* | | |
| OT-001716 | IL12B (p40) | MCHQQLVISWFSLVFLASPLVAIWELKKDVYVVELD | 222 | 223 |
| | signal | WYPDAPGEMVVLTCDTPEEDGITWTLDQSSEVLGSGK | | |
| | sequence; | TLTIQVKEFGDAGQYTCHKGGEVLSHSLLLLHKKEDG | | |
| | IL12B (p40) | IWSTDILKDQKEPKNKTFLRCEAKNYSGRFTCWWLTT | | |
| | (23-328 of | ISTDLTFSVKSSRGSSDPQGVTCGAATLSAERVRGDNK | | |
| | WT); Linker | EYEYSVECQEDSACPAAEESLPIEVMVDAVHKLKYEN | | |
| | ((G4S)3; IL12A | YTSSFFIRDIIKPDPPKNLQLKPLKNSRQVEVSWEYPDT | | |
| | (p35) (57-253 | WSTPHSYFSLTFCVQVQGKSKREKKDRVFTDKTSATV | | |
| | of WT); Linker | ICRKNASISVRAQDRYYSSSWSEWASVPCSGGGGSGG | | |
| | (GS); ER (aa | GGSGGGGSRNLPVATPDPGMFPCLHHSQNLLRAVSN | | |
| | 305-549 of WT, | MLQKARQTLEFYPCTSEEIDHEDITKDKTSTVEACLPL | | |
| | L384M, | ELTKNESCLNSRETSFITNGSCLASRKTSFMMALCLSSI | | |
| | M421G, | YEDLKMYQVEFKTMNAKLLMDPKRQIFLDQNMLAVI | | |
| | Q502C, | DELMQALNFNSETVPQKSSLEEPDFYKTKIKLCILLHA | | |
| | G521R, | FRIRAVTIDRVMSYLNASGSSLALSLTADQMVSALLD | | |
| | Y537S); stop | AEPPILYSEYDPTRPFSEASMMGLLTNLADRELVHMIN | | |
| | | WAKRVPGFVDLTLHDQVHLLECAWMEILMIGLVWRS | | |
| | | MEHPGKLLFAPNLLLDRNQGKCVEGGVEIHMLLATS | | |
| | | SRFRMMNLQGEEFVCLKSIILLNSGVYTFLSSTLKSLEE | | |
| | | KDHIHRVLDKITDTLIHLMAKAGLTLQQQHCRLAQLL | | |
| | | LILSHIRHMSNKRMEHLYSMKCKNVVPLSDLLLEMLD | | |
| | | AHRL* | | |
| OT-001715 | IL12B (p40) | MCHQQLVISWFSLVFLASPLVAIWELKKDVYVVELD | 224 | 225 |
| | signal | WYPDAPGEMVVLTCDTPEEDGITWTLDQSSEVLGSGK | | |
| | sequence; | TLTIQVKEFGDAGQYTCHKGGEVLSHSLLLLHKKEDG | | |
| | IL12B (p40) | IWSTDILKDQKEPKNKTFLRCEAKNYSGRFTCWWLTT | | |
| | (23-328 of | ISTDLTFSVKSSRGSSDPQGVTCGAATLSAERVRGDNK | | |
| | WT); Linker | EYEYSVECQEDSACPAAEESLPIEVMVDAVHKLKYEN | | |
| | ((G4S)3; IL12A | YTSSFFIRDIIKPDPPKNLQLKPLKNSRQVEVSWEYPDT | | |
| | (p35) (57-253 | WSTPHSYFSLTFCVQVQGKSKREKKDRVFTDKTSATV | | |
| | of WT); Linker | ICRKNASISVRAQDRYYSSSWSEWASVPCSGGGGSGG | | |
| | (GS); ER (aa | GGSGGGGSRNLPVATPDPGMFPCLHHSQNLLRAVSN | | |
| | 305-549 of WT, | MLQKARQTLEFYPCTSEEIDHEDITKDKTSTVEACLPL | | |
| | L384M, | ELTKNESCLNSRETSFITNGSCLASRKTSFMMALCLSSI | | |
| | M421G, | YEDLKMYQVEFKTMNAKLLMDPKRQIFLDQNMLAVI | | |
| | Q502W, | DELMQALNFNSETVPQKSSLEEPDFYKTKIKLCILLHA | | |
| | G521R, | FRIRAVTIDRVMSYLNASGSSLALSLTADQMVSALLD | | |
| | Y537S); stop | AEPPILYSEYDPTRPFSEASMMGLLTNLADRELVHMIN | | |
| | | WAKRVPGFVDLTLHDQVHLLECAWMEILMIGLVWRS | | |
| | | MEHPGKLLFAPNLLLDRNQGKCVEGGVEIFDMLLATS | | |
| | | SRFRMMNLQGEEFVCLKSIILLNSGVYTFLSSTLKSLEE | | |
| | | KDHIHRVLDKITDTLIHLMAKAGLTLQQQHWRLAQLL | | |
| | | LILSHIRHMSNKRMEHLYSMKCKNVVPLSDLLLEMLD | | |
| | | AHRL* | | |
| OT-001714 | IL12B (p40) | MCHQQLVISWFSLVFLASPLVAIWELKKDVYVVELD | 226 | 227 |
| | signal | WYPDAPGEMVVLTCDTPEEDGITWTLDQSSEVLGSGK | | |
| | sequence; | TLTIQVKEFGDAGQYTCHKGGEVLSHSLLLLHKKEDG | | |
| | IL12B (p40) | IWSTDILKDQKEPKNKTFLRCEAKNYSGRFTCWWLTT | | |
| | (23-328 of | ISTDLTFSVKSSRGSSDPQGVTCGAATLSAERVRGDNK | | |
| | WT); Linker | EYEYSVECQEDSACPAAEESLPIEVMVDAVHKLKYEN | | |
| | ((G4S)3; IL12A | YTSSFFIRDIIKPDPPKNLQLKPLKNSRQVEVSWEYPDT | | |
| | (p35) (57-253 | WSTPHSYFSLTFCVQVQGKSKREKKDRVFTDKTSATV | | |
| | of WT); Linker | ICRKNASISVRAQDRYYSSSWSEWASVPCSGGGGSGG | | |
| | (GS); ER (aa | GGSGGGGSRNLPVATPDPGMFPCLHHSQNLLRAVSN | | |
| | 305-549 of WT, | MLQKARQTLEFYPCTSEEIDHEDITKDKTSTVEACLPL | | |
| | L384M, | ELTKNESCLNSRETSFITNGSCLASRKTSFMMALCLSSI | | |
| | M421G, | YEDLKMYQVEFKTMNAKLLMDPKRQIFLDQNMLAVI | | |
| | Q502P, G521R, | DELMQALNFNSETVPQKSSLEEPDFYKTKIKLCILLHA | | |
| | Y537S); stop | FRIRAVTIDRVMSYLNASGSSLALSLTADQMVSALLD | | |
| | | AEPPILYSEYDPTRPFSEASMMGLLTNLADRELVHMIN | | |
| | | WAKRVPGFVDLTLHDQVHLLECAWMEILMIGLVWRS | | |
| | | MEHPGKLLFAPNLLLDRNQGKCVEGGVEIFDMLLATS | | |
| | | SRFRMMNLQGEEFVCLKSIILLNSGVYTFLSSTLKSLEE | | |
| | | KDHIHRVLDKITDTLIHLMAKAGLTLQQQHPRLAQLL | | |
| | | LILSHIRHMSNKRMEHLYSMKCKNVVPLSDLLLEMLD | | |
| | | AHRL* | | |
| OT-001713 | IL12B (p40) | MCHQQLVISWFSLVFLASPLVAIWELKKDVYVVELD | 228 | 229 |
| | signal | WYPDAPGEMVVLTCDTPEEDGITWTLDQSSEVLGSGK | | |
| | sequence; | TLTIQVKEFGDAGQYTCHKGGEVLSHSLLLLHKKEDG | | |
| | IL12B (p40) | IWSTDILKDQKEPKNKTFLRCEAKNYSGRFTCWWLTT | | |
| | (23-328 of | ISTDLTFSVKSSRGSSDPQGVTCGAATLSAERVRGDNK | | |
| | WT); Linker | EYEYSVECQEDSACPAAEESLPIEVMVDAVHKLKYEN | | |
| | ((G4S)3; IL12A | YTSSFFIRDIIKPDPPKNLQLKPLKNSRQVEVSWEYPDT | | |
| | (p35) (57-253 | WSTPHSYFSLTFCVQVQGKSKREKKDRVFTDKTSATV | | |
| | of WT); Linker | ICRKNASISVRAQDRYYSSSWSEWASVPCSGGGGSGG | | |
| | (GS); ER (aa | GGSGGGGSRNLPVATPDPGMFPCLHHSQNLLRAVSN | | |
| | 305-549 of WT, | MLQKARQTLEFYPCTSEEIDHEDITKDKTSTVEACLPL | | |
| | L384M, | ELTKNESCLNSRETSFITNGSCLASRKTSFMMALCLSSI | | |
| | M421G, | YEDLKMYQVEFKTMNAKLLMDPKRQIFLDQNMLAVI | | |
| | Q502T, G521R, | DELMQALNFNSETVPQKSSLEEPDFYKTKIKLCILLHA | | |
| | Y537S); stop | FRIRAVTIDRVMSYLNASGSSLALSLTADQMVSALLD | | |
| | | AEPPILYSEYDPTRPFSEASMMGLLTNLADRELVHMIN | | |
| | | WAKRVPGFVDLTLHDQVHLLECAWMEILMIGLVWRS | | |
| | | MEHPGKLLFAPNLLLDRNQGKCVEGGVEIFDMLLATS | | |
| | | SRFRMMNLQGEEFVCLKSIILLNSGVYTFLSSTLKSLEE | | |
| | | KDHIHRVLDKITDTLIHLMAKAGLTLQQQHTRLAQLL | | |
| | | LILSHIRHMSNKRMEHLYSMKCKNVVPLSDLLLEMLD | | |
| | | AHRL* | | |
| OT-001712 | IL12B (p40) | MCHQQLVISWFSLVFLASPLVAIWELKKDVYVVELD | 230 | 231 |
| | signal | WYPDAPGEMVVLTCDTPEEDGITWTLDQSSEVLGSGK | | |
| | sequence; | TLTIQVKEFGDAGQYTCHKGGEVLSHSLLLLHKKEDG | | |
| | IL12B (p40) | IWSTDILKDQKEPKNKTFLRCEAKNYSGRFTCWWLTT | | |
| | (23-328 of | ISTDLTFSVKSSRGSSDPQGVTCGAATLSAERVRGDNK | | |
| | WT); Linker | EYEYSVECQEDSACPAAEESLPIEVMVDAVHKLKYEN | | |
| | ((G4S)3; IL12A | YTSSFFIRDIIKPDPPKNLQLKPLKNSRQVEVSWEYPDT | | |
| | (p35) (57-253 | WSTPHSYFSLTFCVQVQGKSKREKKDRVFTDKTSATV | | |
| | of WT); Linker | ICRKNASISVRAQDRYYSSSWSEWASVPCSGGGGSGG | | |
| | (GS); ER (aa | GGSGGGGSRNLPVATPDPGMFPCLHHSQNLLRAVSN | | |
| | 305-549 of WT, | MLQKARQTLEFYPCTSEEIDHEDITKDKTSTVEACLPL | | |
| | L384M, | ELTKNESCLNSRETSFITNGSCLASRKTSFMMALCLSSI | | |
| | M421G, | YEDLKMYQVEFKTMNAKLLMDPKRQIFLDQNMLAVI | | |
| | Q502A, | DELMQALNFNSETVPQKSSLEEPDFYKTKIKLCILLHA | | |
| | G521R, | FRIRAVTIDRVMSYLNASGSSLALSLTADQMVSALLD | | |
| | Y537S); stop | AEPPILYSEYDPTRPFSEASMMGLLTNLADRELVHMIN | | |
| | | WAKRVPGFVDLTLHDQVHLLECAWMEILMIGLVWRS | | |
| | | MEHPGKLLFAPNLLLDRNQGKCVEGGVEIFDMLLATS | | |
| | | SRFRMMNLQGEEFVCLKSIILLNSGVYTFLSSTLKSLEE | | |
| | | KDHIHRVLDKITDTLIHLMAKAGLTLQQQHARLAQLL | | |
| | | LILSHIRHMSNKRMEHLYSMKCKNVVPLSDLLLEMLD | | |
| | | AHRL* | | |
| OT-001711 | IL12B (p40) | MCHQQLVISWFSLVFLASPLVAIWELKKDVYVVELD | 232 | 233 |
| | signal | WYPDAPGEMVVLTCDTPEEDGITWTLDQSSEVLGSGK | | |
| | sequence; | TLTIQVKEFGDAGQYTCHKGGEVLSHSLLLLHKKEDG | | |
| | IL12B (p40) | IWSTDILKDQKEPKNKTFLRCEAKNYSGRFTCWWLTT | | |
| | (23-328 of | ISTDLTFSVKSSRGSSDPQGVTCGAATLSAERVRGDNK | | |
| | WT); Linker | EYEYSVECQEDSACPAAEESLPIEVMVDAVHKLKYEN | | |
| | ((G4S)3; IL12A | YTSSFFIRDIIKPDPPKNLQLKPLKNSRQVEVSWEYPDT | | |
| | (p35) (57-253 | WSTPHSYFSLTFCVQVQGKSKREKKDRVFTDKTSATV | | |
| | of WT); Linker | ICRKNASISVRAQDRYYSSSWSEWASVPCSGGGGSGG | | |
| | (GS); ER (aa | GGSGGGGSRNLPVATPDPGMFPCLHHSQNLLRAVSN | | |
| | 305-549 of WT, | MLQKARQTLEFYPCTSEEIDHEDITKDKTSTVEACLPL | | |
| | L384M, | ELTKNESCLNSRETSFITNGSCLASRKTSFMMALCLSSI | | |
| | M421G, | YEDLKMYQVEFKTMNAKLLMDPKRQIFLDQNMLAVI | | |
| | Q502D, | DELMQALNFNSETVPQKSSLEEPDFYKTKIKLCILLHA | | |
| | G521R, | FRIRAVTIDRVMSYLNASGSSLALSLTADQMVSALLD | | |
| | Y537S); stop | AEPPILYSEYDPTRPFSEASMMGLLTNLADRELVHMIN | | |
| | | WAKRVPGFVDLTLHDQVHLLECAWMEILMIGLVWRS | | |
| | | MEHPGKLLFAPNLLLDRNQGKCVEGGVEIFDMLLATS | | |
| | | SRFRMMNLQGEEFVCLKSIILLNSGVYTFLSSTLKSLEE | | |
| | | KDHIHRVLDKITDTLIHLMAKAGLTLQQQHDRLAQLL | | |
| | | LILSHIRHMSNKRMEHLYSMKCKNVVPLSDLLLEMLD | | |
| | | AHRL* | | |
| OT-001710 | IL12B (p40) | MCHQQLVISWFSLVFLASPLVAIWELKKDVYVVELD | 234 | 235 |
| | signal | WYPDAPGEMVVLTCDTPEEDGITWTLDQSSEVLGSGK | | |
| | sequence; | TLTIQVKEFGDAGQYTCHKGGEVLSHSLLLLHKKEDG | | |
| | IL12B (p40) | IWSTDILKDQKEPKNKTFLRCEAKNYSGRFTCWWLTT | | |
| | (23-328 of | ISTDLTFSVKSSRGSSDPQGVTCGAATLSAERVRGDNK | | |
| | WT); Linker | EYEYSVECQEDSACPAAEESLPIEVMVDAVHKLKYEN | | |
| | ((G4S)3; IL12A | YTSSFFIRDIIKPDPPKNLQLKPLKNSRQVEVSWEYPDT | | |
| | (p35) (57-253 | WSTPHSYFSLTFCVQVQGKSKREKKDRVFTDKTSATV | | |
| | of WT); Linker | ICRKNASISVRAQDRYYSSSWSEWASVPCSGGGGSGG | | |
| | (GS); ER (aa | GGSGGGGSRNLPVATPDPGMFPCLHHSQNLLRAVSN | | |
| | 305-549 of WT, | MLQKARQTLEFYPCTSEEIDHEDITKDKTSTVEACLPL | | |
| | L384M, | ELTKNESCLNSRETSFITNGSCLASRKTSFMMALCLSSI | | |
| | M421G, | YEDLKMYQVEFKTMNAKLLMDPKRQIFLDQNMLAVI | | |
| | Q502E, G521R, | DELMQALNFNSETVPQKSSLEEPDFYKTKIKLCILLHA | | |
| | Y537S); stop | FRIRAVTIDRVMSYLNASGSSLALSLTADQMVSALLD | | |
| | | AEPPILYSEYDPTRPFSEASMMGLLTNLADRELVHMIN | | |
| | | WAKRVPGFVDLTLHDQVHLLECAWMEILMIGLVWRS | | |
| | | MEHPGKLLFAPNLLLDRNQGKCVEGGVEIFDMLLATS | | |
| | | SRFRMMNLQGEEFVCLKSIILLNSGVYTFLSSTLKSLEE | | |
| | | KDHIHRVLDKITDTLIHLMAKAGLTLQQQHERLAQLL | | |
| | | LILSHIRHMSNKRMEHLYSMKCKNVVPLSDLLLEMLD | | |
| | | AHRL* | | |
| OT-001709 | IL12B (p40) | MCHQQLVISWFSLVFLASPLVAIWELKKDVYVVELD | 236 | 237 |
| | signal | WYPDAPGEMVVLTCDTPEEDGITWTLDQSSEVLGSGK | | |
| | sequence; | TLTIQVKEFGDAGQYTCHKGGEVLSHSLLLLHKKEDG | | |
| | IL12B (p40) | IWSTDILKDQKEPKNKTFLRCEAKNYSGRFTCWWLTT | | |
| | (23-328 of | ISTDLTFSVKSSRGSSDPQGVTCGAATLSAERVRGDNK | | |
| | WT); Linker | EYEYSVECQEDSACPAAEESLPIEVMVDAVHKLKYEN | | |
| | ((G4S)3; IL12A | YTSSFFIRDIIKPDPPKNLQLKPLKNSRQVEVSWEYPDT | | |
| | (p35) (57-253 | WSTPHSYFSLTFCVQVQGKSKREKKDRVFTDKTSATV | | |
| | of WT); Linker | ICRKNASISVRAQDRYYSSSWSEWASVPCSGGGGSGG | | |
| | (GS); ER (aa | GGSGGGGSRNLPVATPDPGMFPCLHHSQNLLRAVSN | | |
| | 305-549 of WT, | MLQKARQTLEFYPCTSEEIDHEDITKDKTSTVEACLPL | | |
| | L384M, | ELTKNESCLNSRETSFITNGSCLASRKTSFMMALCLSSI | | |
| | M421G, | YEDLKMYQVEFKTMNAKLLMDPKRQIFLDQNMLAVI | | |
| | Q502G, | DELMQALNFNSETVPQKSSLEEPDFYKTKIKLCILLHA | | |
| | G521R, | FRIRAVTIDRVMSYLNASGSSLALSLTADQMVSALLD | | |
| | Y537S); stop | AEPPILYSEYDPTRPFSEASMMGLLTNLADRELVHMIN | | |
| | | WAKRVPGFVDLTLHDQVHLLECAWMEILMIGLVWRS | | |
| | | MEHPGKLLFAPNLLLDRNQGKCVEGGVEIHMLLATS | | |
| | | SRFRMMNLQGEEFVCLKSIILLNSGVYTFLSSTLKSLEE | | |
| | | KDHIHRVLDKITDTLIHLMAKAGLTLQQQHGRLAQLL | | |
| | | LILSHIRHMSNKRMEHLYSMKCKNVVPLSDLLLEMLD | | |
| | | AHRL* | | |
| OT-001708 | IL12B (p40) | MCHQQLVISWFSLVFLASPLVAIWELKKDVYVVELD | 238 | 239 |
| | signal | WYPDAPGEMVVLTCDTPEEDGITWTLDQSSEVLGSGK | | |
| | sequence; | TLTIQVKEFGDAGQYTCHKGGEVLSHSLLLLHKKEDG | | |
| | IL12B (p40) | IWSTDILKDQKEPKNKTFLRCEAKNYSGRFTCWWLTT | | |
| | (23-328 of | ISTDLTFSVKSSRGSSDPQGVTCGAATLSAERVRGDNK | | |
| | WT); Linker | EYEYSVECQEDSACPAAEESLPIEVMVDAVHKLKYEN | | |
| | ((G4S)3; IL12A | YTSSFFIRDIIKPDPPKNLQLKPLKNSRQVEVSWEYPDT | | |
| | (p35) (57-253 | WSTPHSYFSLTFCVQVQGKSKREKKDRVFTDKTSATV | | |
| | of WT); Linker | ICRKNASISVRAQDRYYSSSWSEWASVPCSGGGGSGG | | |
| | (GS); ER (305- | GGSGGGGSRNLPVATPDPGMFPCLHHSQNLLRAVSN | | |
| | 549 of WT, | MLQKARQTLEFYPCTSEEIDHEDITKDKTSTVEACLPL | | |
| | L384M, | ELTKNESCLNSRETSFITNGSCLASRKTSFMMALCLSSI | | |
| | M421G, | YEDLKMYQVEFKTMNAKLLMDPKRQIFLDQNMLAVI | | |
| | Q502R, | DELMQALNFNSETVPQKSSLEEPDFYKTKIKLCILLHA | | |
| | G521R, | FRIRAVTIDRVMSYLNASGSSLALSLTADQMVSALLD | | |
| | Y537S); stop | AEPPILYSEYDPTRPFSEASMMGLLTNLADRELVHMIN | | |
| | | WAKRVPGFVDLTLHDQVHLLECAWMEILMIGLVWRS | | |
| | | MEHPGKLLFAPNLLLDRNQGKCVEGGVEIHMLLATS | | |
| | | SRFRMMNLQGEEFVCLKSIILLNSGVYTFLSSTLKSLEE | | |
| | | KDHIHRVLDKITDTLIHLMAKAGLTLQQQHRRLAQLL | | |
| | | LILSHIRHMSNKRMEHLYSMKCKNVVPLSDLLLEMLD | | |
| | | AHRL* | | |
| OT-001737 | IL12B (p40) | MCHQQLVISWFSLVFLASPLVAGSSLALSLTADQMVS | 240 | 241 |
| | signal | ALLDAEPPILYSEYDPTRPFSEASMMGLLTNLADRELV | | |
| | sequence; | HMINWAKRVPGFVDLALHDQVHLLECAWMEILMIGL | | |
| | Linker (GS); | VWRSMEHPGKLLFAPNLLLDRNQGKCVEGGVEIFDM | | |
| | ER (aa 305-549 | LLATSSRFRMMNLQGEEFVCLKSIILLNSGVYTFLSSTL | | |
| | of WT, T371A, | KSLEEKDHIHRVLDKITDTLIHLMAKAGLTLQQQHQR | | |
| | L384M, | LAQLLLILSHIRHMSSKRMEHLYSMKCKNVVPLSDLL | | |
| | M421G, | LEMLDAHRLRTKRIWELKKDVYVVELDWYPDAPGE | | |
| | N519S, G521R, | MVVLTCDTPEEDGITWTLDQSSEVLGSGKTLTIQVKEF | | |
| | Y537S); Furin | GDAGQYTCHKGGEVLSHSLLLLHKKEDGIWSTDILKD | | |
| | cleavage site | QKEPKNKTFLRCEAKNYSGRFTCWWLTTISTDLTFSV | | |
| | (RTKR); IL12B | KSSRGSSDPQGVTCGAATLSAERVRGDNKEYEYSVEC | | |
| | (p40) (23-328 | QED SACPAAEESLPIEVMVDAVHKLKYENYTSSFFIRD | | |
| | of WT); Linker | IIKPDPPKNLQLKPLKNSRQVEVSWEYPDTWSTPHSYF | | |
| | ((G4S)3; IL12A | SLTFCVQVQGKSKREKKDRVFTDKTSATVICRKNASIS | | |
| | (p35) (57-253 | VRAQDRYYSSSWSEWASVPCSGGGGSGGGGSGGGGS | | |
| | of WT); stop | RNLPVATPDPGMFPCLHHSQNLLRAVSNMLQKARQT | | |
| | | LEFYPCTSEEIDHEDITKDKTSTVEACLPLELTKNESCL | | |
| | | NSRETSFITNGSCLASRKTSFMMALCLSSIYEDLKMYQ | | |
| | | VEFKTMNAKLLMDPKRQIFLDQNMLAVIDELMQALN | | |
| | | FNSETVPQKSSLEEPDFYKTKIKLCILLHAFRIRAVTIDR | | |
| | | VMSYLNAS* | | |
| OT-001738 | IL12B (p40) | MCHQQLVISWFSLVFLASPLVAGSSLALSLTADQMVS | 242 | 243 |
| | signal | ALLDAEPPILYSEYDPTRPFSEASMMGLLTNLADRELV | | |
| | sequence; | HMINWAKRVPGFVDLALHDQVHLLECAWMEILMIGL | | |
| | Linker (GS); | VWRSMEHPGKLLFAPNLLLDRNQGKCVEGGVEIFDM | | |
| | ER (aa 305-549 | LLATSSRFRMMNLQGEEFVCLKSIILLNSGVYTFLSSTL | | |
| | of WT, T371A, | KSLEEKDHIHRVLDKITDTLIHLMAKAGLTLQQQHQR | | |
| | L384M, | LAQLLLILSHIRHMSSKRMEHLYSMKCKNVVPLSDLL | | |
| | M421G, | LEMLDAHRLESRRVRRNKRSKIWELKKDVYVVELDW | | |
| | N519S, G521R, | YPDAPGEMVVLTCDTPEEDGITWTLDQSSEVLGSGKT | | |
| | Y537S); | LTIQVKEFGDAGQYTCHKGGEVLSHSLLLLHKKEDGI | | |
| | Modified Furin | WSTDILKDQKEPKNKTFLRCEAKNYSGRFTCWWLTTI | | |
| | (ESRRVRRNK | STDLTFSVKSSRGSSDPQGVTCGAATLSAERVRGDNK | | |
| | RSK); IL12B | EYEYSVECQEDSACPAAEESLPIEVMVDAVHKLKYEN | | |
| | (p40) (23-328 | YTSSFFIRDIIKPDPPKNLQLKPLKNSRQVEVSWEYPDT | | |
| | of WT); Linker | WSTPHSYFSLTFCVQVQGKSKREKKDRVFTDKTSATV | | |
| | ((G4S)3; IL12A | ICRKNASISVRAQDRYYSSSWSEWASVPCSGGGGSGG | | |
| | (p35) (57-253 | GGSGGGGSRNLPVATPDPGMFPCLHHSQNLLRAVSN | | |
| | of WT; stop | MLQKARQTLEFYPCTSEEIDHEDITKDKTSTVEACLPL | | |
| | | ELTKNESCLNSRETSFITNGSCLASRKTSFMMALCLSSI | | |
| | | YEDLKMYQVEFKTMNAKLLMDPKRQIFLDQNMLAVI | | |
| | | DELMQALNFNSETVPQKSSLEEPDFYKTKIKLCILLHA | | |
| | | FRIRAVTIDRVMSYLNAS* | | |

[0175] In some embodiments, the payload of the present disclosure may be a cytokine fused to a cytokine receptor. In one embodiment, the payload may be IL15 fused to IL15 Receptor alpha subunit. A unique feature of IL15 mediated activation is the mechanism of trans-presentation in which IL15 is presented as a complex with the alpha subunit of IL15 receptor (IL15Ra) that binds to and activates membrane bound IL15 beta/gamma receptor, either on the same cell or a different cell. The IL15/IL15Ra complex is much more effective in activating IL15 signaling, than IL15 by itself. In one embodiment, the may be a IL15/IL15Ra fusion polypeptide described in US patent publication NO. US20160158285A1 (the contents of which are incorporated herein by reference in their entirety). The IL15 receptor alpha comprises an extracellular domain called the sushi domain that is considered to contain most of the structural elements necessary for binding to IL15. Thus, in some embodiments, the payload may be the IL15/IL15Ra sushi domain fusion polypeptide described in US Patent Publication NO. US20090238791A1 (the contents of which are incorporated herein by reference in their entirety). The effector modules containing IL15/IL15Ra, and/or DD-IL15/IL15Ra sushi domain may be designed to be secreted (using e.g. IL2 signal sequence) or membrane bound (using e.g. IgE or CD8a signal sequence).

[0176] In some embodiments, the payloads may proteins that induce the expression of IL15 such as proteins in the STING pathway and/or Type I interferons. In one aspect, the payload may be STING agonist. In one aspect, such expressing IL15 directly as a payload or using payloads that induce IL15 expression may use to regulate the tumor-infiltrating lymphocyte numbers in the tumor microenvironment. Any of the payloads described by Carrero et al. to induce IL15 expression may be used herein (Carrero et al. 2019 PNAS January 2019, 116 (2) 599-608; DOI: 10.1073/pnas.1814642116; the contents of which are incorporated herein by reference in their entirety).

[0177] IL15/IL15Ra construct components are described in Table 8. IL15/IL15Ra constructs are described in Table 9. In Table 9, the amino acid sequences may comprise a stop codon at the end which is denoted in Table 9 with a “*”.

TABLE 8
IL15/IL15Ra construct components

| | | AA SEQ | NA SEQ |
|---|---|---|---|
| Description | AA Sequence | ID NO. | ID NO. |
| IgE Leader | MDWTWILFLVAAATRVHS | 244 | 245 |
| IL15 (aa 49-162 of | NWVNVISDLKKIEDLIQSMHIDATLYIESDVHPSC | 246 | 247 |
| WT) | KVTAMKCFLLELQVISLESGDASIHDTVENLIILA | | |
| | NNSLSSNGNVTESGCKECEELEEKNIKEFLQSFVH | | |
| | IVQMFINTS | | |
| IL15Ra (31-267 of | ITCPPPMSVEHADIWVKSYSLYSRERYICNSGFKR | 248 | 249 |
| WT) | KAGTSSLTECVLNKATNVAHWTTPSLKCIRDPAL | | |
| | VHQRPAPPSTVTTAGVTPQPESLSPSGKEPAASSP | | |
| | SSNNTAATTAAIVPGSQLMPSKSPSTGTTEISSHES | | |
| | SHGTPSQTTAKNWELTASASHQPPGVYPQGHSDT | | |
| | TVAISTSTVLLCGLSAVSLLACYLKSRQTPPLASV | | |
| | EMEAMEALPVTWGTSSRDEDLENCSHHL | | |
| SG3-(SG4)3-SG3- | SGGGSGGGGSGGGGSGGGGSGGGSLQ | 250 | 251 |
| SLQ | | | |
| CD8α leader | MALPVTALLLPLALLLHAARP | 99 | 100 |
| Linker (G4S)3 | GGGGSGGGGSGGGGS | 125 | 126 |

TABLE 9
IL15/IL15Ra constructs

| | | | AA | NA |
|---|---|---|---|---|
| | | | SEQ | SEQ |
| Construct | | | ID | ID |
| ID | Description | AA Sequence | NO. | NO. |
| OT-001734 | IgE Leader; | MDWTWILFLVAAATRVHSNWVNVISDLKKIEDLI | 252 | 253 |
| | IL15 (aa 49-162 | QSMHIDATLYTESDVHPSCKVTAMKCFLLELQVI | | |
| | of WT); | SLESGDASIHDTVENLIILANNSLSSNGNVTESGC | | |
| | Artificial linker | KECEELEEKNIKEFLQSFVHIVQMFINTSSGGGSG | | |
| | (SG3-(SG4)3- | GGGSGGGGSGGGGSGGGSLQITCPPPMSVEHADI | | |
| | SG3-SLQ); | WVKSYSLYSRERYICNSGFKRKAGTSSLTECVLN | | |
| | IL15Ra (31-267 | KATNVAHWTTPSLKCIRDPALVHQRPAPPSTVIT | | |
| | of WT); Linker | AGVTPQPESLSPSGKEPAASSPSSNNTAATTAAIV | | |
| | (GS); ER (aa | PGSQLMPSKSPSTGTTEISSHESSHGTPSQTTAKN | | |
| | 305-549 of WT, | WELTASASHQPPGVYPQGHSDTTVAISTSTVLLC | | |
| | R335G, | GLSAVSLLACYLKSRQTPPLASVEMEAMEALPVT | | |
| | L384M, | WGTSSRDEDLENCSHHLGSSLALSLTADQMVSAL | | |
| | M421G, | LDAEPPILYSEYDPTGPFSEASMMGLLTNLADREL | | |
| | G521R, E523 G, | VHMINWAKRVPGFVDLTLHDQVHLLECAWMEIL | | |
| | Y537S, | MIGLVWRSMEHPGKLLFAPNLLLDRNQGKCVEG | | |
| | A546T); stop | GVEIFDMLLATSSRFRMMNLQGEEFVCLKSIILLN | | |
| | | SGVYTFLSSTLKSLEEKDHIHRVLDKITDTLIHLM | | |
| | | AKAGLTLQQQHQRLAQLLLILSHIRHMSNKRMG | | |
| | | HLYSMKCKNVVPLSDLLLEMLDTHRL* | | |
| OT-001733 | IgE Leader; | MDWTWILFLVAAATRVHSNWVNVISDLKKIEDLI | 254 | 255 |
| | IL15 (aa 49-162 | QSMHIDATLYTESDVHPSCKVTAMKCFLLELQVI | | |
| | of WT); | SLESGDASIHDTVENLIILANNSLSSNGNVTESGC | | |
| | Artificial linker | KECEELEEKNIKEFLQSFVHIVQMFINTSSGGGSG | | |
| | (SG3-(SG4)3- | GGGSGGGGSGGGGSGGGSLQITCPPPMSVEHADI | | |
| | SG3-SLQ); | WVKSYSLYSRERYICNSGFKRKAGTSSLTECVLN | | |
| | IL15Ra (31-267 | KATNVAHWTTPSLKCIRDPALVHQRPAPPSTVIT | | |
| | of WT); Linker | AGVTPQPESLSPSGKEPAASSPSSNNTAATTAAIV | | |
| | (GS); ER (aa | PGSQLMPSKSPSTGTTEISSHESSHGTPSQTTAKN | | |
| | 305-549 of WT, | WELTASASHQPPGVYPQGHSDTTVAISTSTVLLC | | |
| | L384M; | GLSAVSLLACYLKSRQTPPLASVEMEAMEALPVT | | |
| | M421G; T431I; | WGTSSRDEDLENCSHHLGSSLALSLTADQMVSAL | | |
| | G521R,Y537S); | LDAEPPILYSEYDPTRPFSEASMMGLLTNLADREL | | |
| | stop | VHMINWAKRVPGFVDLTLHDQVHLLECAWMEIL | | |
| | | MIGLVWRSMEHPGKLLFAPNLLLDRNQGKCVEG | | |
| | | GVEIFDMLLAISSRFRMMNLQGEEFVCLKSIILLN | | |
| | | SGVYTFLSSTLKSLEEKDHIHRVLDKITDTLIHLM | | |
| | | AKAGLTLQQQHQRLAQLLLILSHIRHMSNKRMEH | | |
| | | LYSMKCKNVVPLSDLLLEMLDAHRL* | | |
| OT-001732 | IgE Leader; | MDWTWILFLVAAATRVHSNWVNVISDLKKIEDLI | 256 | 257 |
| | IL15 (aa 49-162 | QSMHIDATLYTESDVHPSCKVTAMKCFLLELQVI | | |
| | of WT); | SLESGDASIHDTVENLIILANNSLSSNGNVTESGC | | |
| | Artificial linker | KECEELEEKNIKEFLQSFVHIVQMFINTSSGGGSG | | |
| | (SG3-(SG4)3- | GGGSGGGGSGGGGSGGGSLQITCPPPMSVEHADI | | |
| | SG3-SLQ); | WVKSYSLYSRERYICNSGFKRKAGTSSLTECVLN | | |
| | IL15Ra (31-267 | KATNVAHWTTPSLKCIRDPALVHQRPAPPSTVIT | | |
| | of WT); Linker | AGVTPQPESLSPSGKEPAASSPSSNNTAATTAAIV | | |
| | (GS); ER(aa | PGSQLMPSKSPSTGTTEISSHESSHGTPSQTTAKN | | |
| | 305-549 of WT, | WELTASASHQPPGVYPQGHSDTTVAISTSTVLLC | | |
| | L384M, | GLSAVSLLACYLKSRQTPPLASVEMEAMEALPVT | | |
| | N413D, | WGTSSRDEDLENCSHHLGSSLALSLTADQMVSAL | | |
| | M421G, | LDAEPPILYSEYDPTRPFSEASMMGLLTNLADREL | | |
| | G521R, | VHMINWAKRVPGFVDLTLHDQVHLLECAWMEIL | | |
| | Y537S); stop | MIGLVWRSMEHPGKLLFAPNLLLDRDQGKCVEG | | |
| | | GVEIFDMLLATSSRFRMMNLQGEEFVCLKSIILLN | | |
| | | SGVYTFLSSTLKSLEEKDHIHRVLDKITDTLIHLM | | |
| | | AKAGLTLQQQHQRLAQLLLILSHIRHMSNKRMEH | | |
| | | LYSMKCKNVVPLSDLLLEMLDAHRL* | | |
| OT-001735 | IgE Leader; | MDWTWILFLVAAATRVHSNWVNVISDLKKIEDLI | 258 | 259 |
| | IL15 (aa 49-162 | QSMHIDATLYTESDVHPSCKVTAMKCFLLELQVI | | |
| | of WT); | SLESGDASIHDTVENLIILANNSLSSNGNVTESGC | | |
| | Artificial linker | KECEELEEKNIKEFLQSFVHIVQMFINTSSGGGSG | | |
| | (SG3-(SG4)3- | GGGSGGGGSGGGGSGGGSLQITCPPPMSVEHADI | | |
| | SG3-SLQ); | WVKSYSLYSRERYICNSGFKRKAGTSSLTECVLN | | |
| | IL15Ra (31-267 | KATNVAHWTTPSLKCIRDPALVHQRPAPPSTVIT | | |
| | of WT); Linker | AGVTPQPESLSPSGKEPAASSPSSNNTAATTAAIV | | |
| | (GS); ER (aa | PGSQLMPSKSPSTGTTEISSHESSHGTPSQTTAKN | | |
| | 305-549 of WT, | WELTASASHQPPGVYPQGHSDTTVAISTSTVLLC | | |
| | L384M, | GLSAVSLLACYLKSRQTPPLASVEMEAMEALPVT | | |
| | M421G, | WGTSSRDEDLENCSHHLGSSLALSLTADQMVSAL | | |
| | N519S, G521R, | LDAEPPILYSEYDPTRPFSEASMMGLLTNLADREL | | |
| | Y537S); stop | VHMINWAKRVPGFVDLTLHDQVHLLECAWMEIL | | |
| | | MIGLVWRSMEHPGKLLFAPNLLLDRNQGKCVEG | | |
| | | GVEIFDMLLATSSRFRMMNLQGEEFVCLKSIILLN | | |
| | | SGVYTFLSSTLKSLEEKDHIHRVLDKITDTLIHLM | | |
| | | AKAGLTLQQQHQRLAQLLLILSHIRHMSSKRMEH | | |
| | | LYSMKCKNVVPLSDLLLEMLDAHRL* | | |
| OT-001731 | IgE Leader; | MDWTWILFLVAAATRVHSNWVNVISDLKKIEDLI | 260 | 261 |
| | IL 15 (aa 49-162 | QSMHIDATLYTESDVHPSCKVTAMKCFLLELQVI | | |
| | of WT); | SLESGDASIHDTVENLIILANNSLSSNGNVTESGC | | |
| | Artificial linker | KECEELEEKNIKEFLQSFVHIVQMFINTSSGGGSG | | |
| | (SG3-(SG4)3- | GGGSGGGGSGGGGSGGGSLQITCPPPMSVEHADI | | |
| | SG3-SLQ); | WVKSYSLYSRERYICNSGFKRKAGTSSLTECVLN | | |
| | IL15Ra (31-267 | KATNVAHWTTPSLKCIRDPALVHQRPAPPSTVIT | | |
| | of WT); Linker | AGVTPQPESLSPSGKEPAASSPSSNNTAATTAAIV | | |
| | (GS); ER (305- | PGSQLMPSKSPSTGTTEISSHESSHGTPSQTTAKN | | |
| | 549 of WT, | WELTASASHQPPGVYPQGHSDTTVAISTSTVLLC | | |
| | L384M, | GLSAVSLLACYLKSRQTPPLASVEMEAMEALPVT | | |
| | M421G, | WGTSSRDEDLENCSHHLGSSLALSLTADQMVSAL | | |
| | Q502R, | LDAEPPILYSEYDPTRPFSEASMMGLLTNLADREL | | |
| | G521R, | VHMINWAKRVPGFVDLTLHDQVHLLECAWMEIL | | |
| | Y537S); stop | MIGLVWRSMEHPGKLLFAPNLLLDRNQGKCVEG | | |
| | | GVEIFDMLLATSSRFRMMNLQGEEFVCLKSIILLN | | |
| | | SGVYTFLSSTLKSLEEKDHIHRVLDKITDTLIHLM | | |
| | | AKAGLTLQQQHRRLAQLLLILSHIRHMSNKRMEH | | |
| | | LYSMKCKNVVPLSDLLLEMLDAHRL* | | |
| OT-001730 | IgE Leader; | MDWTWILFLVAAATRVHSNWVNVISDLKKIEDLI | 262 | 263 |
| | IL15 (aa 49-162 | QSMHIDATLYTESDVHPSCKVTAMKCFLLELQVI | | |
| | of WT); | SLESGDASIHDTVENLIILANNSLSSNGNVTESGC | | |
| | Artificial linker | KECEELEEKNIKEFLQSFVHIVQMFINTSSGGGSG | | |
| | (SG3-(SG4)3- | GGGSGGGGSGGGGSGGGSLQITCPPPMSVEHADI | | |
| | SG3-SLQ); | WVKSYSLYSRERYICNSGFKRKAGTSSLTECVLN | | |
| | IL15Ra (31-267 | KATNVAHWTTPSLKCIRDPALVHQRPAPPSTVIT | | |
| | of WT); Linker | AGVTPQPESLSPSGKEPAASSPSSNNTAATTAAIV | | |
| | (GS); ER (aa | PGSQLMPSKSPSTGTTEISSHESSHGTPSQTTAKN | | |
| | 305-549 of WT, | WELTASASHQPPGVYPQGHSDTTVAISTSTVLLC | | |
| | T371A, | GLSAVSLLACYLKSRQTPPLASVEMEAMEALPVT | | |
| | L384M, | WGTSSRDEDLENCSHHLGSSLALSLTADQMVSAL | | |
| | M421G, | LDAEPPILYSEYDPTRPFSEASMMGLLTNLADREL | | |
| | N519S, G521R, | VHMINWAKRVPGFVDLALHDQVHLLECAWMEIL | | |
| | Y537S); stop | MIGLVWRSMEHPGKLLFAPNLLLDRNQGKCVEG | | |
| | | GVEIFDMLLATSSRFRMMNLQGEEFVCLKSIILLN | | |
| | | SGVYTFLSSTLKSLEEKDHIHRVLDKITDTLIHLM | | |
| | | AKAGLTLQQQHQRLAQLLLILSHIRHMSSKRMEH | | |
| | | LYSMKCKNVVPLSDLLLEMLDAHRL* | | |
| OT-001729 | IgE Leader; | MDWTWILFLVAAATRVHSNWVNVISDLKKIEDLI | 264 | 265 |
| | IL15 (aa 49-162 | QSMHIDATLYTESDVHPSCKVTAMKCFLLELQVI | | |
| | of WT); | SLESGDASIHDTVENLIILANNSLSSNGNVTESGC | | |
| | Artificial linker | KECEELEEKNIKEFLQSFVHIVQMFINTSSGGGSG | | |
| | (SG3-(SG4)3- | GGGSGGGGSGGGGSGGGSLQITCPPPMSVEHADI | | |
| | SG3-SLQ); | WVKSYSLYSRERYICNSGFKRKAGTSSLTECVLN | | |
| | IL15Ra (31-267 | KATNVAHWTTPSLKCIRDPALVHQRPAPPSTVIT | | |
| | of WT); Linker | AGVTPQPESLSPSGKEPAASSPSSNNTAATTAAIV | | |
| | (GS); ER (aa | PGSQLMPSKSPSTGTTEISSHESSHGTPSQTTAKN | | |
| | 305-549 of WT, | WELTASASHQPPGVYPQGHSDTTVAISTSTVLLC | | |
| | S305N, | GLSAVSLLACYLKSRQTPPLASVEMEAMEALPVT | | |
| | L384M, | WGTSSRDEDLENCSHHLGSNLALSLTADQMVSA | | |
| | MV421G, | LLDAEPPILYSEYDPTRPFSEASMMGLLTNLADRE | | |
| | G442V, | LVHMINWAKRVPGFVDLTLHDQVHLLECAWMEI | | |
| | G521R, | LMIGLVWRSMEHPGKLLFAPNLLLDRNQGKCVE | | |
| | Y537S); stop | GGVEIFDMLLATSSRFRMMNLQVEEFVCLKSTILL | | |
| | | NSGVYTFLSSTLKSLEEKDHIHRVLDKITDTLIHL | | |
| | | MAKAGLTLQQQHQRLAQLLLILSHIRHMSNKRM | | |
| | | EHLYSMKCKNVVPLSDLLLEMLDAHRL* | | |
| OT-001728 | IgE Leader; | MDWTWILFLVAAATRVHSNWVNVISDLKKIEDLI | 266 | 267 |
| | IL 15 (aa 49-162 | QSMHIDATLYTESDVHPSCKVTAMKCFLLELQVI | | |
| | of WT); | SLESGDASIHDTVENLIILANNSLSSNGNVTESGC | | |
| | Artificial linker | KECEELEEKNIKEFLQSFVHIVQMFINTSSGGGSG | | |
| | (SG3-(SG4)3- | GGGSGGGGSGGGGSGGGSLQITCPPPMSVEHADI | | |
| | SG3-SLQ); | WVKSYSLYSRERYICNSGFKRKAGTSSLTECVLN | | |
| | IL15Ra (31-267 | KATNVAHWTTPSLKCIRDPALVHQRPAPPSTVIT | | |
| | of WT); Linker | AGVTPQPESLSPSGKEPAASSPSSNNTAATTAAIV | | |
| | (GS); ER (aa | PGSQLMPSKSPSTGTTEISSHESSHGTPSQTTAKN | | |
| | 305-549 of WT, | WELTASASHQPPGVYPQGHSDTTVAISTSTVLLC | | |
| | R335G, | GLSAVSLLACYLKSRQTPPLASVEMEAMEALPVT | | |
| | L384M, | WGTSSRDEDLENCSHHLGSSLALSLTADQMVSAL | | |
| | M421G, | LDAEPPILYSEYDPTGPFSEASMMGLLTNLADREL | | |
| | N519S, G521R, | VHMINWAKRVPGFVDLTLHDQVHLLECAWMEIL | | |
| | Y537S); stop | MIGLVWRSMEHPGKLLFAPNLLLDRNQGKCVEG | | |
| | | GVEIFDMLLATSSRFRMMNLQGEEFVCLKSIILLN | | |
| | | SGVYTFLSSTLKSLEEKDHIHRVLDKITDTLIHLM | | |
| | | AKAGLTLQQQHQRLAQLLLILSHIRHMSSKRMEH | | |
| | | LYSMKCKNVVPLSDLLLEMLDAHRL* | | |
| OT-001727 | CD8a leader | MALPVTALLLPLALLLHAARPGSSLALSLTADQM | 268 | 269 |
| | sequence; | VSALLDAEPPILYSEYDPTRPFSEASMMGLLTNLA | | |
| | Linker (GS); | DRELVHMINWAKRVPGFVDLALHDQVHLLECA | | |
| | ER (aa 305-549 | WMEILMIGLVWRSMEHPGKLLFAPNLLLDRNQG | | |
| | of WT, T371A, | KCVEGGVEIFDMLLATSSRFRMMNLQGEEFVCL | | |
| | L384M, | KSIILLNSGVYTFLSSTLKSLEEKDHIHRVLDKITD | | |
| | M421G, | TLIHLMAKAGLTLQQQHQRLAQLLLILSHIRHMSS | | |
| | N519S, G521R, | KRMEHLYSMKCKNVVPLSDLLLEMLDAHRLGSN | | |
| | Y537S); Linker | WVNVISDLKKIEDLIQSMHIDATLYTESDVHPSCK | | |
| | (GS); IL15 (aa | VTAMKCFLLELQVISLESGDASIHDTVENLIILAN | | |
| | 49-162 of WT); | NSLSSNGNVTESGCKECEELEEKNIKEFLQSFVHI | | |
| | Artificial linker | VQMFINTSSGGGSGGGGSGGGGSGGGGSGGGSL | | |
| | (SG3-(SG4)3- | QITCPPPMSVEHADIWVKSYSLYSRERYICNSGFK | | |
| | SG3-SLQ); | RKAGTSSLTECVLNKATNVAHWTTPSLKCIRDPA | | |
| | IL15Ra (31-267 | LVHQRPAPPSTVTTAGVTPQPESLSPSGKEPAASS | | |
| | of WT); stop | PSSNNTAATTAAIVPGSQLMPSKSPSTGTTEISSHE | | |
| | | SSHGTPSQTTAKNWELTASASHQPPGVYPQGHSD | | |
| | | TTVAISTSTVLLCGLSAVSLLACYLKSRQTPPLAS | | |
| | | VEMEAMEALPVTWGTSSRDEDLENCSHHL* | | |

[0178] In some embodiments, payloads fused to the DDs of the disclosure may be an inhibitor of an immunosuppressive molecule such as TGF-beta and IDO.

[0179] In some embodiments, payloads of the present disclosure may comprise SRE regulated safety switches that can eliminate adoptively transferred cells in the case of severe toxicity, thereby mitigating the adverse effects of T cell therapy. Adoptively transferred T cells in immunotherapy may attack normal cells in response to normal tissue expression of TAA. Even on-tumor target activity of adoptively transferred T cells can result in toxicities such as tumor lysis syndrome, cytokine release syndrome and the related macrophage activation syndrome. Safety switches may be utilized to eliminate inappropriately activated adoptively transferred cells by induction of apoptosis or by immunosurveillance.

[0180] In some embodiments, payloads of the present disclosure may comprise inducible killer/suicide genes that acts as a safety switch. The killer/suicide gene when introduced into adoptively transferred immune cells, could control their alloreactivity. The killer/suicide gene may be an apoptotic gene (e.g., any Caspase gene) which allows conditional apoptosis of the transduced cells by administration of a non-therapeutic ligand of the SRE (e.g., DD).

[0181] In some embodiments, the payloads of the present disclosure may be Caspase 9. In some instances, Caspase 9 may be modified to have low basal expression and lacking the Caspase recruitment domain (CARD) (SEQ ID NO. 26 and SEQ ID NO. 28 of U.S. Pat. No. 9,434,935B2; the contents of which are incorporated by reference in their entirety).

[0182] In one embodiment, the payload of the present disclosure is a suicide gene system, iCasp9/Chemical induced dimerization (CID) system which consists of a polypeptide derived from the Caspase9 gene fused to a drug binding domain derived from the human FK506 protein. Administration of bioinert, small molecule AP1903 (rimiducid), induces cross linking of the drug binding domains and dimerization of the fusion protein and in turn the dimerization of Caspase 9. This results in the activation of downstream effector Caspase 3 and subsequent induction of cellular apoptosis (Straathof et al., Blood, 2005, 105: 4247-4254; incorporated herein by reference in its entirety). Preclinical trials using CART including an iCasp9 gene have shown effective elimination of CAR T cells in vivo in mouse models and demonstrate the potential efficacy of this approach. (Budde et al, Plos One, 2013, 8: e82742.10.1371; Hoyos et al., Leukemia, 2010; 24(6):1160-1170).

[0183] In some instances, the iCasp9/CID system has been shown to have a basal rate of dimerization even in the absence of rimiducid, resulting in unintended cell death. Regulating the expression levels of iCasp9/CID is critical for maximizing the efficacy of iCasp9/CID system. Biocircuits of the present disclosure and/or any of their components may be utilized in regulating or tuning the iCasp9/CID system to optimize its utility. Other examples of proteins used in dimerization-induced apoptosis paradigm may include, but are not limited to Fas receptor, the death effector domain of Fas-associated protein, FADD, Caspase 1, Caspase 3, Caspase 7 and Caspase 8. (Belshaw P. J. et al, Chem Biol., 996, 3:731-738; MacCorkle R. A. et al, Proc Natl Acad Sci, 1998, 95:3655-3660; Spencer, D. M. et al., Curr Biol. 1996; 6:839-847; the contents of each of which are incorporated herein by reference in their entirety).

[0184] In some embodiments, the safety switch of the present disclosure may comprise a metabolic enzyme, such as herpes simplex virus thymidine kinase (HSV-TK) and cytosine deaminase (CD). HSV-TK phosphorylates nucleoside analogs, including acyclovir and ganciclovir (GCV) to generate triphosphate form of nucleosides. When incorporated into DNA, it leads to chain termination and cell death. Unlike the mammalian thymidine kinase, HSV-TK is characterized by 1000-fold higher affinity to nucleoside analogs such as GCV, making it suitable for use as a suicide gene in mammalian cells. Cytosine deaminase (CD) can converts 5-fluorocytosine (5-FC) into the cytotoxic 5-fluorouracil (5-FU) (Tiraby et al., FEMS Lett., 1998, 167: 41-49).

[0185] In some embodiments, the safety switch of the present disclosure may comprise a CYP4B1 mutant (as suicide gene), which may be co-expressed in a CAR engineered T cells (Roellecker et al., Gen Ther., 2016, May 19, doi: 10.1038/gt.2016.38.).

[0186] In some embodiments, the payload of the present disclosure may comprise a fusion construct that can induce cell death, for example, a polypeptide with the formula of St-R1-S1-Q-52-R2, wherein the St is a stalk sequence, R1/2 and Q are different epitopes; and S1/2 are optional spacer sequences (See International Patent Publication NO. WO2013153391; the content of which are incorporated herein by reference in their entirety).

[0187] In some embodiments, safety switch may be mediated by therapeutic antibodies which specifically bind to an antigen that is expressed in the plasma membrane of adoptively transferred cells. The antigen-antibody interaction allows cell removal after administration of a specific monoclonal antibody against the antigen. As non-limiting examples, payloads of the present disclosure may comprise the antigen and antibody pair used to mediate safety switch such as CD20 and anti-CD20 antibody (Griffioen et al., Haematologica, 2009, 94:1316-1320), a protein tag and anti-tag antibody (Kieback et al., Natl. Acad. Sci. USA., 2008, 105: 623-628), a compact suicide gene (RQR8) combining epitopes from CD34 (as a marker moiety) and CD20 (as a suicide moiety) which enables CD34 selection, cell tracking, as well as cell deletion after anti-CD20 monoclonal antibody administration (Philip et al., Blood, 2014, 124: 1277-1287); truncated human EGFR polypeptide and anti-EGFR monoclonal antibody (Wang et al., Blood, 2011, 118:1255-1263); and a compact polypeptide safety switch having a structural formula as discussed in U.S. Patent Application Publication NO. US20150093401; the contents of each of which are incorporated herein by reference in their entirety.

[0188] In one embodiment, the payload may be a regulated CD28 superagonist ScFv, which is capable of exogenously controlling the co-stimulation of TCR or 4-1BB CAR engineered T-cells

[0189] In one embodiment, the payload is c-myc. Regulated expression of c-myc may be utilized to confer activated metabolic state in T-cells

[0190] In some embodiments, the promoter of the disclosure may be a Tet-ON promoter. Combination of the transcription regulation Tet system with the DDs permits simultaneous control of gene expression and protein stability. Any of the dual-Tet ON-DD systems described by Pedone et al. (2018) doi: https://doi.org/10.1101/404699 may be useful in the present disclosure (the contents of which are herein incorporated by reference in their entirety).

[0191] In some embodiments, the payload may be CD28 co-receptors and/or 4-1BBL, which may be used as a costimulatory signal for T-cells.

[0192] In some embodiments, the payload of the disclosure may be a homing signal molecule which includes a D3 exodomain, an IgG1 hinge, and a CD6 transmembrane and signaling domains. Biocircuits comprising such payloads may be successful in guiding T cells to activated leukocyte cell adhesion molecule (ALCAM) positive tumors such as but not limited to glioblastomas. Any of the homing signal molecules taught by Samaha et al. (2018) Nature 561, 331-337 may be useful in the present disclosure (the contents of which are incorporated by reference in their entirety).

[0193] In one embodiment, regulated cytokines may enable CAR-T in solid tumors to overcome stromal barriers by improving tumor homing, reducing immunosuppression, and reducing tumor promoting conditions. In one embodiment, regulated cytokines may enable CAR-T in solid tumors to overcome Antigen negative escape by promoting epitope spreading, antigen presenting cell trafficking, activation and licensing. In one embodiment, regulated cytokines may enable CAR-T in solid tumors to overcome Antigen positive escape by improving expansion, increasing persistence, reducing exhaustion of T cells. In one embodiment, regulated cytokines enable local, on demand production of cytokines can safely improve efficacy. In one embodiment, regulated cytokines enable pulsatile production that can reduce feedback inhibition of cytokine signaling. In one embodiment, regulated cytokines can reduce senescence or exhaustion. In one embodiment, regulated cytokines enable on demand expression in patient which may reduce any effect of cytokine on cell phenotype during product manufacturing.

[0194] In some embodiments, the payload may be a cytokine based CAR, wherein the antigen binding domain of the CAR is substituted by a cytokine which may bind to its cognate receptor. In one embodiment, the payload is humanized interleukin-13 receptor α2 (IL-13Rα2) chimeric antigen receptors (CARs), Hu07BBz and Hu08BBz, that recognized human IL-13Rα2, but not IL-13Rα1. The efficacy of such CAR may further be improved by PD-1 and TIM-3 blockade. Any of the CARs described in Yin et al. Mol Ther Oncolytics. 2018 Aug. 28; 11:20-38, may be useful in the present invention (the contents of which are incorporated by reference in their entirety).

### 4. Genomic Editing Systems

[0195] In some embodiments, payloads of the present disclosure may be components of gene editing systems including a CRISPR (Clustered Regularly Interspaced Short Palindromic Repeats), CRISPR enzyme (Cas9), CRISPR-Cas9 or CRISPR system and CRISPR-CAS9 complex. It may also be other genomic editing systems, such as Zinc finger nucleases, TALEN (Transcription activator-like effector-based nucleases) and meganucleases.

### Additional Features

[0196] The effector module of the present disclosure may further comprise a signal sequence which regulates the distribution of the payload, a cleavage and/or processing feature which facilitate cleavage of the payload from the effector module construct, a targeting and/or penetrating signal which can regulate the cellular localization of the effector module, and/or one or more linker sequences which link different components (e.g. a DD and a payload) of the effector module.

### 1. Signal Sequences

[0197] In addition to the SRE (e.g., DD) and payload region, effector modules of the disclosure may further comprise one or more signal sequences. Signal sequences (sometimes referred to as signal peptides, targeting signals, target peptides, localization sequences, transit peptides, leader sequences or leader peptides) direct proteins (e.g., the effector module of the present disclosure) to their designated cellular and/or extracellular locations. Protein signal sequences play a central role in the targeting and translocation of nearly all secreted proteins and many integral membrane proteins.

[0198] A signal sequence is a short (5-30 amino acids long) peptide present at the N-terminus of the majority of newly synthesized proteins that are destined towards a particular location. Signal sequences can be recognized by signal recognition particles (SRPs) and cleaved using type I and type II signal peptide peptidases. Signal sequences derived from human proteins can be incorporated as a regulatory module of the effector module to direct the effector module to a particular cellular and/or extracellular location. These signal sequences are experimentally verified and can be cleaved (Zhang et al., Protein Sci. 2004, 13:2819-2824).

[0199] In some embodiments, a signal sequence may be, although not necessarily, located at the N-terminus or C-terminus of the effector module, and may be, although not necessarily, cleaved off the desired effector module to yield a “mature” payload, i.e., an immunotherapeutic agent as discussed herein.

[0200] In some examples, a signal sequence may be a secreted signal sequence derived from a naturally secreted protein, and its variant thereof. In some instances, the secreted signal sequences may be cytokine signal sequences such as, but not limited to, IL2 signal sequence comprising amino acid of SEQ ID NO. 270, encoded by the nucleotide of SEQ ID NOs. 271-274 and/or p40 signal sequence comprising the amino acid sequence of SEQ ID NO. 101, encoded by the nucleotide of SEQ ID NOs. 102, 275-282 or a GMCSF leader sequence comprising the amino acid sequence of SEQ ID NOs. 283-285.

[0201] In some instances, signal sequences directing the payload to the surface membrane of the target cell may be used. Expression of the payload on the surface of the target cell may be useful to limit the diffusion of the payload to non-target in vivo environments, thereby potentially improving the safety profile of the payloads. Additionally, the membrane presentation of the payload may allow for physiologically and qualitative signaling as well as stabilization and recycling of the payload for a longer half-life. Membrane sequences may be the endogenous signal sequence of the N terminal component of the payload. Optionally, it may be desirable to exchange this sequence for a different signal sequence. Signal sequences may be selected based on their compatibility with the secretory pathway of the cell type of interest so that the payload is presented on the surface of the T cell. In some embodiments, the signal sequence may be IgE signal sequence comprising amino acid SEQ ID NO. 244 and nucleotide sequence of SEQ ID NO. 245, a CD8a signal sequence comprising amino acid SEQ ID NO. 99 and nucleotide sequence of SEQ ID NOs. 100, 286-292 or an IL15Ra signal sequence, comprising amino acid SEQ ID NO. 293, encoded by SEQ ID NO. 294.

[0202] Other examples of signal sequences include, a variant may be a modified signal sequence discussed in U.S. Pat. Nos. 8,148,494, 8,258,102, 9,133,265, 9,279,007, and U.S. Patent Application Publication No. 2007/0141666; and International Patent Publication No. WO1993/018181; the contents of each of which are incorporated herein by reference in their entirety. In other examples, a signal sequence may be a heterogeneous signal sequence from other organisms such as virus, yeast and bacteria, which can direct an effector module to a particular cellular site, such as a nucleus (e.g., EP 1209450). Other examples may include Aspartic Protease (NSP24) signal sequences from Trichoderma that can increase secretion of fused protein such as enzymes (e.g., U.S. Pat. No. 8,093,016 to Cervin and Kim), bacterial lipoprotein signal sequences (e.g., International Patent Publication No. WO1991/09952 to Lau and Rioux), E. coli enterotoxin II signal peptides (e.g., U.S. Pat. No. 6,605,697 to Kwon et al.), E. coli secretion signal sequence (e.g., U.S. Patent Publication No. 2016/090404 to Malley et al.), a lipase signal sequence from a methylotrophic yeast (e.g., U.S. Pat. No. 8,975,041), and signal peptides for DNases derived from Coryneform bacteria (e.g., U.S. Pat. No. 4,965,197); the contents of each of which are incorporated herein by reference in their entirety.

[0203] Signal sequences may also include nuclear localization signals (NLSs), nuclear export signals (NESs), polarized cell tubulo-vesicular structure localization signals (See, e.g., U.S. Pat. No. 8,993,742; Cour et al., Nucleic Acids Res. 2003, 31(1): 393-396; the contents of each of which are incorporated herein by reference in their entirety), extracellular localization signals, signals to subcellular locations (e.g. lysosome, endoplasmic reticulum, golgi, mitochondria, plasma membrane and peroxisomes, etc.) (See, e.g., U.S. Pat. No. 7,396,811; and Negi et al., Database, 2015, 1-7; the contents of each of which are incorporated herein by reference in their entirety).

[0204] In some embodiments, signal sequences of the present disclosure, include without limitation, any of those taught in Table 6 of co-pending commonly owned U.S. Provisional Patent Application No. 62/320,864 filed on Apr. 11, 2016, or in U.S. Provisional Application No. 62/466,596 filed Mar. 3, 2017, and the International Publication WO2017/180587, the contents of each of which are incorporated herein by reference in their entirety.

[0205] Any of the signal sequences described in the present disclosure that include a Methionine residue at position 1 of the sequence may also be utilized without the methionine at position 1 of the amino acid sequence. For example, a CD8a signal sequence, MALPVTALLLPLALLLHAARP (SEQ ID NO. 99; encoded by SEQ ID NO. 100 or SEQ ID NO. 367) comprising a methionine sequence may also be utilized without the methionine at position one i.e. as ALPVTALLLPLALLLHAARP (SEQ ID NO. 408; encoded by 409).

### 2. Cleavage Sites

[0206] In some embodiments, the effector module comprises a cleavage and/or processing feature. The effector module of the present disclosure may include at least one protein cleavage signal/site. The protein cleavage signal/site may be located at the N-terminus, the C-terminus, at any space between the N- and the C-termini such as, but not limited to, half-way between the N- and C-termini, between the N-terminus and the half-way point, between the half-way point and the C-terminus, and combinations thereof.

[0207] The effector module may include one or more cleavage signal(s)/site(s) of any proteinases. The proteinases may be a serine proteinase, a cysteine proteinase, an endopeptidase, a dipeptidase, a metalloproteinase, a glutamic proteinase, a threonine proteinase and an aspartic proteinase. In some aspects, the cleavage site may be a signal sequence of furin, actinidain, calpain-1, carboxypeptidase A, carboxypeptidase P, carboxypeptidase Y, caspase-1, caspase-2, caspase-3, caspase-4, caspase-5, caspase-6, caspase-7, caspase-8, caspase-9, caspase-10, cathepsin B, cathepsin C, cathepsin G, cathepsin H, cathepsin K, cathepsin L, cathepsin S, cathepsin V, clostripain, chymase, chymotrypsin, elastase, endoproteinase, enterokinase, factor Xa, formic acid, granzyme B, Matrix metallopeptidase-2, Matrix metallopeptidase-3, pepsin, proteinase K, SUMO protease, subtilisin, TEV protease, thermolysin, thrombin, trypsin and TAGZyme.

[0208] In one embodiment, the cleavage site is a furin cleavage site comprising the amino acid sequence SARNRQKRS (SEQ ID NO. 295, encoded by nucleotide sequence of SEQ ID NO. 296), or a revised furin cleavage site comprising the amino acid sequence ARNRQKRS (SEQ ID NO. 297, encoded by nucleotide sequence of SEQ ID NO. 298); or a modified furin site comprising the amino acid sequence ESRRVRRNKRSK (SEQ ID NO. 299, encoded by nucleotide sequence of SEQ ID NO. 300-302); or a SGESRRVRRNKRSK (SEQ ID NO. 303, encoded by the nucleotide sequence of SEQ ID NO. 304). In some instances, the cleavage site is a P2A cleavage site, ATNFSLLKQAGDVEENPGP (SEQ ID NO. 120, encoded by SEQ ID NO. 121), wherein NPGP (SEQ ID NO. 305) is the P2A site.

[0209] In some embodiments, cleavage sites of the present disclosure, include without limitation, any of those taught in Table 7 of co-pending commonly owned U.S. Provisional Patent Application No. 62/320,864 filed on Apr. 11, 2016, or in U.S. Provisional Application No. 62/466,596 filed Mar. 3, 2017, and the International Publication WO2017/180587, the contents of each of which are incorporated herein by reference in their entirety.

### 3. Protein Tags

[0210] In some embodiments, the effector module of the disclosure may comprise a protein tag. The protein tag may be used for detecting and monitoring the process of the effector module. The effector module may include one or more tags such as an epitope tag (e.g., a FLAG or hemagglutinin (HA) tag). A large number of protein tags may be used for the present effector modules. They include, but are not limited to, self-labeling polypeptide tags (e.g., haloalkane dehalogenase (halotag2 or halotag7), ACP tag, clip tag, MCP tag, snap tag), epitope tags (e.g., FLAG, HA, His, and Myc), fluorescent tags (e.g., green fluorescent protein (GFP), red fluorescent protein (RFP), yellow fluorescent protein (YFP), and its variants), bioluminescent tags (e.g. luciferase and its variants), affinity tags (e.g., maltose-binding protein (MBP) tag, glutathione-S-transferase (GST) tag), immunogenic affinity tags (e.g., protein A/G, IRS, AU1, AU5, glu-glu, KT3, S-tag, HSV, VSV-G, Xpress and V5), and other tags (e.g., biotin (small molecule), StrepTag (StrepII), SBP, biotin carboxyl carrier protein (BCCP), eXact, CBP, CYD, HPC, CBD intein-chitin binding domain, Trx, NorpA, and NusA.

[0211] In other embodiments, a tag may also be selected from those disclosed in U.S. Pat. Nos. 8,999,897, 8,357,511, 7,094,568, 5,011,912, 4,851,341, and 4,703,004; U.S Patent Application Publication Nos. 2013/115635 and 2013/012687; and International Patent Publication No. WO2013/091661; the contents of each of which are incorporated herein by reference in their entirety.

[0212] In some aspects, a multiplicity of protein tags, either the same or different tags, may be used; each of the tags may be located at the same N- or C-terminus, whereas in other cases these tags may be located at each terminus.

[0213] In some embodiments, protein tags of the present disclosure, include without limitation, any of those taught in Table 8 of co-pending commonly owned U.S. Provisional Patent Application No. 62/320,864 filed on Apr. 11, 2016, or in U.S. Provisional Application No. 62/466,596 filed Mar. 3, 2017, and the International Publication WO2017/180587, the contents of which are incorporated herein by reference in their entirety.

### 4. Targeting Peptides

[0214] In some embodiments, the effector module of the disclosure may further comprise a targeting and/or penetrating peptide. Small targeting and/or penetrating peptides that selectively recognize cell surface markers (e.g. receptors, trans-membrane proteins, and extra-cellular matrix molecules) can be employed to target the effector module to the desired organs, tissues or cells. Short peptides (5-50 amino acid residues) synthesized in vitro and naturally occurring peptides, or analogs, variants, derivatives thereof, may be incorporated into the effector module for homing the effector module to the desired organs, tissues and cells, and/or subcellular locations inside the cells.

[0215] In some embodiments, a targeting sequence and/or penetrating peptide may be included in the effector module to drive the effector module to a target organ, or a tissue, or a cell (e.g., a cancer cell). In other embodiments, a targeting and/or penetrating peptide may direct the effector module to a specific subcellular location inside a cell.

[0216] A targeting peptide has any number of amino acids from about 6 to about 30 inclusive. The peptide may have 6, 7, 8, 9, 10, 11, 12, 13, 14, 15, 16, 17, 18, 19, 20, 21, 22, 23, 24, 25, 26, 27, 28, 29 or 30 amino acids. Generally, a targeting peptide may have 25 or fewer amino acids, for example, 20 or fewer, for example 15 or fewer.

[0217] Exemplary targeting peptides may include, but are not limited to, those disclosed in the art, e.g., U.S. Pat. Nos. 9,206,231, 9,110,059, 8,706,219, and 8,772,449; and U.S. Patent Application Publication Nos. 2016/089447, 2016/060296, 2016/060314, 2016/060312, 2016/060311, 2016/009772, 2016/002613, 2015/314011, and 2015/166621; and International Patent Publication Nos. WO2015/179691 and WO2015/183044; the contents of each of which are incorporated herein by reference in their entirety. In some embodiments, targeting peptides of the present disclosure, include without limitation, any of those taught in Table 9 of co-pending commonly owned U.S. Provisional Patent Application No. 62/320,864 filed on Apr. 11, 2016, or in U.S. Provisional Application No. 62/466,596 filed Mar. 3, 2017, and the International Publication WO2017/180587, the contents of each of which are incorporated herein by reference in their entirety.

### 5. Linkers

[0218] In some embodiments, the effector module of the disclosure may further comprise a linker sequence. The linker region serves primarily as a spacer between two or more polypeptides within the effector module. The “linker” or “spacer”, as used herein, refers to a molecule or group of molecules that connects two molecules, or two parts of a molecule such as two domains of a recombinant protein.

[0219] In some embodiments, “Linker” (L) or “linker domain” or “linker region” or “linker module” or “peptide linker” as used herein refers to an oligo- or polypeptide region of from about 1 to 100 amino acids in length, which links together any of the domains/regions of the effector module (also called peptide linker). The peptide linker may be 1-40 amino acids in length, or 2-30 amino acids in length, or 20-80 amino acids in length, or 50-100 amino acids in length. Linker length may also be optimized depending on the type of payload utilized and based on the crystal structure of the payload. In some instances, a shorter linker length may be preferably selected. In some aspects, the peptide linker is made up of amino acids linked together by peptide bonds, preferably from 1 to 20 amino acids linked by peptide bonds, wherein the amino acids are selected from the 20 naturally occurring amino acids: Glycine (G), Alanine (A), Valine (V), Leucine (L), Isoleucine (I), Serine (S), Cysteine (C), Threonine (T), Methionine (M), Proline (P), Phenylalanine (F), Tyrosine (Y), Tryptophan (W), Histidine (H), Lysine (K), Arginine (R), Aspartate (D), Glutamic acid (E), Asparagine (N), and Glutamine (Q). One or more of these amino acids may be glycosylated, as is understood by those in the art. In some aspects, amino acids of a peptide linker may be selected from Alanine (A), Glycine (G), Proline (P), Asparagine (R), Serine (S), Glutamine (Q) and Lysine (K).

[0220] In some embodiments, an artificially designed peptide linker may be composed of a polymer of flexible residues such as Glycine (G) and Serine (S) so that the adjacent protein domains are free to move relative to one another. Longer linkers may be used when it is desirable to ensure that two adjacent domains do not interfere with one another. The choice of a particular linker sequence may be of concern if it affects biological activity, stability, folding, targeting and/or pharmacokinetic features of the fusion construct. Examples of peptide linkers include but are not limited to are provided in Table 10.

TABLE 10
Linkers

| | AA | NA |
|---|---|---|
| | SEQ ID | SEQ ID |
| Linker Sequence | NO. | NO. |
| GGSG | 306 | 307 |
| GGSGG | 308 | 309-313 |
| GGSGGG | 314 | 315-316 |
| SGGGS | 317 | 318 |
| GGSGGGSGG | 319 | 320 |
| GGGGG | 321 | — |
| GGGGS | 322 | — |
| GGGGSGGGGS | 323 | — |
| GGGGSGGGGSGGGGSGGGGS | 324 | — |
| GGGGSGGGGSGGGGSGGGGSG | 325 | — |
| GGGS | | |
| GGGGSGGGGSGGGGSGGGGSG | 326 | — |
| GGGSGGGGS | | |
| SSSSG | 327 | — |
| SSSSGSSSSG | 328 | — |
| SSSSGSSSSGSSSSG | 329 | — |
| SSSSGSSSSGSSSSGSSSSG | 330 | — |
| SSSSGSSSSGSSSSGSSSSGSSSSG | 331 | — |
| SSSSGSSSSGSSSSGSSSSGSSSSG | 332 | — |
| SSSSG | | |
| SGGGSGGGGSGGGGSGGGGSG | 250 | 251 |
| GGSLQ | | |
| EFSTEF | 333 | 334-335 |
| SGGGS | 336 | 337 |
| GKSSGSGSESKS | 338 | — |
| GGSTSGSGKSSEGKG | 339 | — |
| GSTSGSGKSSSEGSGSTKG | 340 | — |
| GSTSGSGKPGSGEGSTKG | 341 | — |
| VDYPYDVPDYALD | 342 | 343 |
| EGKSSGSGSESKEF | 344 | 125; |
| | | 345-349 |
| SGGGSGGGGSGGGGSGGGGSG | 350 | 351 |
| GGSLQYPYDVPDYA | | |
| DYKDDDDK | 352 | 353 |
| SGGGSGGGGSGGGGSGGGGSG | 354 | 355 |
| GGGSGGGGSGGGS | | |
| SGGGSGGGGSGGGGSGGGGSYP | 356 | 357 |
| YDVPDYASGGGS | | |
| GSGATNFSLLKQAGDVEENPGP | 358 | 359 |
| SGGGGSGGGGSGGGGSGGGSLQ | 360 | — |
| GGGG | 361 | — |
| GGGGGGGG | 362 | — |

[0221] The linkers described herein are exemplary, and linkers that are much longer and which include other residues are contemplated by the present disclosure. In one embodiment, the linker may be MH or EF.

[0222] A linker sequence may be a natural linker derived from a multi-domain protein. A natural linker is a short peptide sequence that separates two different domains or motifs within a protein.

[0223] In some aspects, linkers may be flexible or rigid. In other aspects, linkers may be cleavable or non-cleavable. As used herein, the terms “cleavable linker domain or region” or “cleavable peptide linker” are used interchangeably. In some embodiments, the linker sequence may be cleaved enzymatically and/or chemically. Examples of enzymes (e.g., proteinase/peptidase) useful for cleaving the peptide linker include, but are not limited, to Arg-C proteinase, Asp-N endopeptidase, chymotrypsin, clostripain, enterokinase, Factor Xa, glutamyl endopeptidase, Granzyme B, Achromobacter proteinase I, pepsin, proline endopeptidase, proteinase K, Staphylococcal peptidase I, thermolysin, thrombin, trypsin, and members of the Caspase family of proteolytic enzymes (e.g. Caspases 1-10). Chemical sensitive cleavage sites may also be included in a linker sequence. Examples of chemical cleavage reagents include, but are not limited to, cyanogen bromide, which cleaves methionine residues; N-chloro succinimide, iodobenzoic acid or BNPS-skatole [2-(2-nitrophenylsulfenyl)-3-methylindole], which cleaves tryptophan residues; dilute acids, which cleave at aspartyl-prolyl bonds; and e aspartic acid-proline acid cleavable recognition sites (i.e., a cleavable peptide linker comprising one or more D-P dipeptide moieties). The fusion module may include multiple regions encoding peptides of interest separated by one or more cleavable peptide linkers.

[0224] In other embodiments, a cleavable linker may be a “self-cleaving” linker peptide, such as 2A linker (for example T2A), 2A-like linkers or functional equivalents thereof and combinations thereof. In some embodiments, the linkers include the picornaviral 2A-like linker, CHYSEL sequences of porcine teschovirus (P2A), Thosea asigna virus (T2A) or combinations, variants and functional equivalents thereof. In some embodiments, the biocircuits of the present disclosure may include 2A peptides. The 2A peptide is a sequence of about 20 amino acid residues from a virus that is recognized by a protease (2A peptidases) endogenous to the cell. The 2A peptide was identified among picornaviruses, a typical example of which is the Foot-and Mouth disease virus (Robertson B H, et. al., J Virol 1985, 54:651-660). 2A-like sequences have also been found in Picornaviridae like equine rhinitis A virus, as well as unrelated viruses such as porcine teschovirus-1 and the insect Thosea asigna virus (TaV). In such viruses, multiple proteins are derived from a large polyprotein encoded by an open reading frame. The 2A peptide mediates the co-translational cleavage of this polyprotein at a single site that forms the junction between the virus capsid and replication polyprotein domains. These sequences are thought to act co-translationally, preventing the formation of a normal peptide bond between the glycine and last proline, resulting in the ribosome skipping of the next codon (Donnelly M L et al. (2001). J Gen Virol, 82:1013-1025). After cleavage, the short peptide remains fused to the C-terminus of the protein upstream of the cleavage site, while the proline is added to the N-terminus of the protein downstream of the cleavage site. Of the 2A peptides identified to date, four have been widely used namely FMDV 2A (abbreviated herein as F2A); equine rhinitis A virus (ERAV) 2A (E2A); porcine teschovirus-1 2A (P2A) and Thosea asigna virus 2A (T2A). In some embodiments, the 2A peptide sequences useful in the present disclosure are selected from SEQ ID NO. 8-11 of International Patent Publication WO2010042490, the contents of which are incorporated by reference in its entirety.

[0225] Other linkers will be apparent to those skilled in the art and may be used in connection with alternate embodiments of the disclosure.

[0226] The linkers of the present disclosure may also be non-peptide linkers. For example, alkyl linkers such as —NH—(CH₂)a-C(O)—, wherein a=2-20 can be used. These alkyl linkers may further be substituted by any non-sterically hindering group such as lower alkyl (e.g., C₁-C₆) lower acyl, halogen (e.g., Cl, Br), CN, NH₂, phenyl, etc.

[0227] In some aspects, the linker may be an artificial linker from U.S. Pat. Nos. 4,946,778, 5,525,491, 5,856,456; and International Patent Publication No. WO2012/083424; the contents of each of which are incorporated herein by reference in their entirety.

[0228] In some embodiments, linkers of the present disclosure, include without limitation, any of those taught in Table 11 of co-pending commonly owned U.S. Provisional Patent Application No. 62/320,864 filed on Apr. 11, 2016, or in U.S. Provisional Application No. 62/466,596 filed Mar. 3, 2017, and the International Publication WO2017/180587, the contents of each of which are incorporated herein by reference in their entirety.

### 6. Embedded Stimulus, Signals and Other Regulatory Features

[0229] microRNAs (or miRNA) are 19-25 nucleotide long noncoding RNAs that bind to the 3′UTR of nucleic acid molecules and down-regulate gene expression either by reducing nucleic acid molecule stability or by inhibiting translation. The polynucleotides of the disclosure may comprise one or more microRNA target sequences, microRNA sequences, or microRNA seeds. Such sequences may correspond to any known microRNA such as those taught in U.S. Publication Nos. US2005/0261218 and US2005/0059005, the contents of each of which are incorporated herein by reference in their entirety. As a non-limiting embodiment, known microRNAs, their sequences and their binding site sequences in the human genome are in Table 14 of the co-pending commonly owned U.S. Ser. No. 62/320,864 filed on Apr. 11, 2016, or in U.S. Provisional Application No. 62/466,596 filed Mar. 3, 2017, and the International Publication WO2017/180587, the contents of each of which are incorporated herein by reference in their entirety.

[0230] A microRNA sequence comprises a “seed” region, i.e., a sequence in the region of positions 2-8 of the mature microRNA, which sequence has perfect Watson-Crick complementarity to the miRNA target sequence. A microRNA seed may comprise positions 2-8 or 2-7 of the mature microRNA. In some embodiments, a microRNA seed may comprise 7 nucleotides (e.g., nucleotides 2-8 of the mature microRNA), wherein the seed-complementary site in the corresponding miRNA target is flanked by an adenine (A) opposed to microRNA position 1. In some embodiments, a microRNA seed may comprise 6 nucleotides (e.g., nucleotides 2-7 of the mature microRNA), wherein the seed-complementary site in the corresponding miRNA target is flanked by an adenine (A) opposed to microRNA position 1. See for example, Grimson A, Farh K K, Johnston W K, Garrett-Engele P, Lim L P, Bartel D P; Mol Cell. 2007 Jul. 6; 27(1):91-105. The bases of the microRNA seed have complete complementarity with the target sequence. By engineering microRNA target sequences into the polynucleotides encoding the biocircuit components, effector modules, SREs or payloads of the disclosure one can target the molecule for degradation or reduced translation, provided the microRNA in question is available. This process will reduce the hazard of off target effects upon nucleic acid molecule delivery.

[0231] Identification of microRNA, microRNA target regions, and their expression patterns and role in biology have been reported (Bonauer et al., Curr Drug Targets 2010 11:943-949; Anand and Cheresh Curr Opin Hematol 2011 18:171-176; Contreras and Rao Leukemia 2012 26:404-413 (2011 Dec. 20. doi: 10.1038/leu.2011.356); Bartel Cell 2009 136:215-233; Landgraf et al, Cell, 2007 129:1401-1414; Gentner and Naldini, Tissue Antigens. 2012 80:393-403 and all references therein; each of which is herein incorporated by reference in its entirety).

[0232] For example, if the polynucleotide is not intended to be delivered to the liver but ends up there, then miR-122, a microRNA abundant in liver, can inhibit the expression of the polynucleotide if one or multiple target sites of miR-122 are engineered into the polynucleotide. Introduction of one or multiple binding sites for different microRNA can be engineered to further decrease the longevity, stability, and protein translation of a polynucleotide hence providing an additional layer of tenability beyond the stimulus selection, SRE design and payload variation.

[0233] As used herein, the term “microRNA site” refers to a microRNA target site or a microRNA recognition site, or any nucleotide sequence to which a microRNA binds or associates. It should be understood that “binding” may follow traditional Watson-Crick hybridization rules or may reflect any stable association of the microRNA with the target sequence at or adjacent to the microRNA site.

[0234] Conversely, for the purposes of the polynucleotides of the present disclosure, microRNA binding sites can be engineered out of (i.e. removed from) sequences in which they naturally occur in order to increase protein expression in specific tissues. For example, miR-122 binding sites may be removed to improve protein expression in the liver.

[0235] Regulation of expression in multiple tissues can be accomplished through introduction or removal or one or several microRNA binding sites.

[0236] Specifically, microRNAs are known to be differentially expressed in immune cells (also called hematopoietic cells), such as antigen presenting cells (APCs) (e.g. dendritic cells and macrophages), macrophages, monocytes, B lymphocytes, T lymphocytes, granulocytes, natural killer cells, etc. Immune cell specific microRNAs are involved in immunogenicity, autoimmunity, the immune-response to infection, inflammation, as well as unwanted immune response after gene therapy and tissue/organ transplantation. Immune cells specific microRNAs also regulate many aspects of development, proliferation, differentiation and apoptosis of hematopoietic cells (immune cells). For example, miR-142 and miR-146 are exclusively expressed in the immune cells, particularly abundant in myeloid dendritic cells. Introducing the miR-142 binding site into the 3′-UTR of a polypeptide of the present disclosure can selectively suppress the gene expression in the antigen presenting cells through miR-142 mediated mRNA degradation, limiting antigen presentation in professional APCs (e.g. dendritic cells) and thereby preventing antigen-mediated immune response after gene delivery (see, Annoni A et al., blood, 2009, 114, 5152-5161, the content of which is herein incorporated by reference in its entirety.)

[0237] In one embodiment, microRNAs binding sites that are known to be expressed in immune cells, in particular, the antigen presenting cells, can be engineered into the polynucleotides to suppress the expression of the polynucleotide in APCs through microRNA mediated RNA degradation, subduing the antigen-mediated immune response, while the expression of the polynucleotide is maintained in non-immune cells where the immune cell specific microRNAs are not expressed.

[0238] Many microRNA expression studies have been conducted, and are described in the art, to profile the differential expression of microRNAs in various cancer cells/tissues and other diseases. Some microRNAs are abnormally over-expressed in certain cancer cells and others are under-expressed. For example, microRNAs are differentially expressed in cancer cells (WO2008/154098, US2013/0059015, US2013/0042333, WO2011/157294); cancer stem cells (US2012/0053224); pancreatic cancers and diseases (US2009/0131348, US2011/0171646, US2010/0286232, U.S. Pat. No. 8,389,210); asthma and inflammation (U.S. Pat. No. 8,415,096); prostate cancer (US2013/0053264); hepatocellular carcinoma (WO2012/151212, US2012/0329672, WO2008/054828, U.S. Pat. No. 8,252,538); lung cancer cells (WO2011/076143, WO2013/033640, WO2009/070653, US2010/0323357); cutaneous T cell lymphoma (WO2013/011378); colorectal cancer cells (WO2011/0281756, WO2011/076142); cancer positive lymph nodes (WO2009/100430, US2009/0263803); nasopharyngeal carcinoma (EP2112235); chronic obstructive pulmonary disease (US2012/0264626, US2013/0053263); thyroid cancer (WO2013/066678); ovarian cancer cells (US2012/0309645, WO2011/095623); breast cancer cells (WO2008/154098, WO2007/081740, US2012/0214699), leukemia and lymphoma (WO2008/073915, US2009/0092974, US2012/0316081, US2012/0283310, WO2010/018563, the content of each of which is incorporated herein by reference in their entirety).

[0239] In one embodiment, microRNA may be used as described herein in support of the creation of tunable biocircuits.

[0240] In some embodiments, effector modules may be designed to encode (as a DNA or RNA or mRNA) one or more payloads, SREs and/or regulatory sequence such as a microRNA or microRNA binding site. In some embodiments, any of the encoded payloads or SREs may be stabilized or de-stabilized by mutation and then combined with one or more regulatory sequences to generate a dual or multi-tuned effector module or biocircuit system.

[0241] Each aspect or tuned modality may bring to the effector module or biocircuit a differentially tuned feature. For example, an SRE may represent a destabilizing domain, while mutations in the protein payload may alter its cleavage sites or dimerization properties or half-life and the inclusion of one or more microRNA or microRNA binding site may impart cellular detargeting or trafficking features. Consequently, the present disclosure embraces biocircuits which are multifactorial in their tenability.

[0242] In some embodiments, compositions of the disclosure may include optional proteasome adaptors. As used herein, the term “proteasome adaptor” refers to any nucleotide/amino acid sequence that targets the appended payload for degradation. In some aspects, the adaptors target the payload for degradation directly thereby circumventing the need for ubiquitination reactions. Proteasome adaptors may be used in conjunction with destabilizing domains to reduce the basal expression of the payload. Exemplary proteasome adaptors include the UbL domain of Rad23 or hHR23b, HPV E7 which binds to both the target protein Rb and the S4 subunit of the proteasome with high affinity, which allows direct proteasome targeting, bypassing the ubiquitination machinery; the protein gankyrin which binds to Rb and the proteasome subunit S6.

[0243] Such biocircuits may be engineered to contain one, two, three, four or more tuned features.

[0244] In some embodiments, microRNA sequences of the present disclosure, include without limitation, any of those taught in Table 13 of co-pending commonly owned U.S. Provisional Patent Application No. 62/320,864 filed on Apr. 11, 2016, or in U.S. Provisional Application No. 62/466,596 filed Mar. 3, 2017, and the International Publication WO2017/180587, the contents of each of which are incorporated herein by reference in their entirety.

### Degrons

[0245] In some embodiments, the effector modules of the present disclosure may include degrons at their C termini. The degrons may comprise -GG, -RG, -KG, -QG, -WG, -PG, and -AG as the penultimate and the ultimate amino acids of the SREs. Furthermore, certain −2 amino acids (D, E, V, I and L) may be more enriched in the C terminus of the of the effector modules. Other degrons include, but are not limited, to RxxG motif, wherein x is any amino acid, C-terminal twin glutamic acid (EE) motif, and motifs that comprise an arginine at the −3 positions. Degrons may also be selected from the R-3 motif, G-end, R at −3, A-end, A at −2, V at −2 positions. Any of the degrons described in Koren et al., 2018, Cell 173, 1-14, may be useful in the present disclosure (the contents of which are incorporated by reference in their entirety). In some aspects, the expression of the effector module may be tuned by altering its overall amino acid composition. In some aspects, the amino acid composition of the effector module may be tuned to reduce basal expression. In some embodiments, basal expression may be tuned by increasing the number of bulky aromatic residues such as tryptophan (W), phenylalanine (F), and tyrosine (Y) in the effector module. Such bulky amino acids are known to reduce protein stability. In some embodiments, the amino acid composition of the SREs may be enriched with acidic residues such as, but not limited to, aspartic acid (D) and glutamic acid (E), and positively charged lysine (K), if an increase in the basal expression of the SRE is desired.

### Polynucleotides

[0246] The present disclosure provides polynucleotides encoding novel ER DDs, effector modules comprising payloads and associated DDs, biocircuit systems comprising DDs and effector modules, and other components of the present disclosure.

[0247] The term “polynucleotide” or “nucleic acid molecule” in its broadest sense, includes any compound and/or substance that comprise a polymer of nucleotides, e.g., linked nucleosides. These polymers are often referred to as polynucleotides. Exemplary nucleic acids or polynucleotides of the disclosure include, but are not limited to, ribonucleic acids (RNAs), deoxyribonucleic acids (DNAs), threose nucleic acids (TNAs), glycol nucleic acids (GNAs), peptide nucleic acids (PNAs), locked nucleic acids (LNAs, including LNA having a β-D-ribo configuration, α-LNA having an α-L-ribo configuration (a diastereomer of LNA), 2′-amino-LNA having a 2′-amino functionalization, and 2′-amino-α-LNA having a 2′-amino functionalization) or hybrids thereof.

[0248] In some embodiments, polynucleotides of the disclosure may be a messenger RNA (mRNA) or any nucleic acid molecule and may or may not be chemically modified. In one aspect, the nucleic acid molecule is a mRNA. As used herein, the term “messenger RNA (mRNA)” refers to any polynucleotide which encodes a polypeptide of interest and which is capable of being translated to produce the encoded polypeptide of interest in vitro, in vivo, in situ or ex vivo.

[0249] Traditionally, the basic components of an mRNA molecule include at least a coding region, a 5′UTR, a 3′UTR, a 5′ cap and a poly-A tail. Building on this wild type modular structure, the present disclosure expands the scope of functionality of traditional mRNA molecules by providing payload constructs which maintain a modular organization, but which comprise one or more structural and/or chemical modifications or alterations which impart useful properties to the polynucleotide, for example tenability of function. As used herein, a “structural” feature or modification is one in which two or more linked nucleosides are inserted, deleted, duplicated, inverted or randomized in a polynucleotide without significant chemical modification to the nucleosides themselves. Because chemical bonds will necessarily be broken and reformed to effect a structural modification, structural modifications are of a chemical nature and hence are chemical modifications. However, structural modifications will result in a different sequence of nucleotides. For example, the polynucleotide “ATCG” may be chemically modified to “AT-5meC-G”. The same polynucleotide may be structurally modified from “ATCG” to “ATCCCG”. Here, the dinucleotide “CC” has been inserted, resulting in a structural modification to the polynucleotide.

[0250] In some embodiments, polynucleotides of the present disclosure may harbor 5′UTR sequences which play a role in translation initiation. 5′UTR sequences may include features such as Kozak sequences which are commonly known to be involved in the process by which the ribosome initiates translation of genes, Kozak sequences have the consensus XCCR(A/G)CC-start codon (AUG), where R is a purine (adenine or guanine) three bases upstream of the start codon (AUG) and X is any nucleotide. In one embodiment, the Kozak sequence is ACCGCC. By engineering the features that are typically found in abundantly expressed genes of target cells or tissues, the stability and protein production of the polynucleotides of the disclosure can be enhanced.

[0251] Further provided are polynucleotides, which may contain an internal ribosome entry site (IRES) which play an important role in initiating protein synthesis in the absence of 5′ cap structure in the polynucleotide. An IRES may act as the sole ribosome binding site or may serve as one of the multiple binding sites. Polynucleotides of the disclosure containing more than one functional ribosome binding site may encode several peptides or polypeptides that are translated independently by the ribosomes giving rise to bicistronic and/or multicistronic nucleic acid molecules.

[0252] In some embodiments, polynucleotides encoding biocircuits, effector modules, DDs and payloads may include from about 30 to about 100,000 nucleotides (e.g., from 30 to 50, from 30 to 100, from 30 to 250, from 30 to 500, from 30 to 1,000, from 30 to 1,500, from 30 to 3,000, from 30 to 5,000, from 30 to 7,000, from 30 to 10,000, from 30 to 25,000, from 30 to 50,000, from 30 to 70,000, from 100 to 250, from 100 to 500, from 100 to 1,000, from 100 to 1,500, from 100 to 3,000, from 100 to 5,000, from 100 to 7,000, from 100 to 10,000, from 100 to 25,000, from 100 to 50,000, from 100 to 70,000, from 100 to 100,000, from 500 to 1,000, from 500 to 1,500, from 500 to 2,000, from 500 to 3,000, from 500 to 5,000, from 500 to 7,000, from 500 to 10,000, from 500 to 25,000, from 500 to 50,000, from 500 to 70,000, from 500 to 100,000, from 1,000 to 1,500, from 1,000 to 2,000, from 1,000 to 3,000, from 1,000 to 5,000, from 1,000 to 7,000, from 1,000 to 10,000, from 1,000 to 25,000, from 1,000 to 50,000, from 1,000 to 70,000, from 1,000 to 100,000, from 1,500 to 3,000, from 1,500 to 5,000, from 1,500 to 7,000, from 1,500 to 10,000, from 1,500 to 25,000, from 1,500 to 50,000, from 1,500 to 70,000, from 1,500 to 100,000, from 2,000 to 3,000, from 2,000 to 5,000, from 2,000 to 7,000, from 2,000 to 10,000, from 2,000 to 25,000, from 2,000 to 50,000, from 2,000 to 70,000, and from 2,000 to 100,000 nucleotides). In some aspects, polynucleotides of the disclosure may include more than 10,000 nucleotides.

[0253] Regions of the polynucleotides which encode certain features such as cleavage sites, linkers, trafficking signals, tags or other features may range independently from 10-1,000 nucleotides in length (e.g., greater than 20, 30, 40, 45, 50, 55, 60, 70, 80, 90, 100, 120, 140, 160, 180, 200, 250, 300, 350, 400, 450, 500, 600, 700, 800, and 900 nucleotides or at least 10, 15, 20, 25, 30, 35, 40, 45, 50, 55, 60, 70, 80, 90, 100, 120, 140, 160, 180, 200, 250, 300, 350, 400, 450, 500, 600, 700, 800, 900, and 1,000 nucleotides).

[0254] In some embodiments, polynucleotides of the present disclosure may further comprise embedded regulatory moieties such as microRNA binding sites within the 3′UTR of nucleic acid molecules which when bind to microRNA molecules, down-regulate gene expression either by reducing nucleic acid molecule stability or by inhibiting translation. Conversely, for the purposes of the polynucleotides of the present disclosure, microRNA binding sites can be engineered out of (i.e. removed from) sequences in which they naturally occur in order to increase protein expression in specific tissues. For example, miR-142 and miR-146 binding sites may be removed to improve protein expression in the immune cells. In some embodiments, any of the encoded payloads may be regulated by an SRE and then combined with one or more regulatory sequences to generate a dual or multi-tuned effector module or biocircuit system.

[0255] In some embodiments, polynucleotides of the present disclosure may encode fragments, variants, derivatives of polypeptides of the disclosures. In some aspects, the variant sequence may keep the same or a similar activity. Alternatively, the variant may have an altered activity (e.g., increased or decreased) relative to the start sequence. Generally, variants of a particular polynucleotide or polypeptide of the disclosure will have at least about 40%, 45%, 50%, 55%, 60%, 65%, 70%, 75%, 80%, 85%, 90%, 91%, 92%, 93%, 94%, 95%, 96%, 97%, 98%, 99% but less than 100% sequence identity to that particular reference polynucleotide or polypeptide as determined by sequence alignment programs and parameters described herein and known to those skilled in the art. Such tools for alignment include those of the BLAST suite (Stephen et al., Gapped BLAST and PSI-BLAST: a new generation of protein database search programs, Nucleic Acids Res., 1997, 25:3389-3402.)

[0256] In some embodiments, polynucleotides of the present disclosure may be modified. As used herein, the terms “modified”, or as appropriate, “modification” refers to chemical modification with respect to A, G, U (T in DNA) or C nucleotides. Modifications may be on the nucleoside base and/or sugar portion of the nucleosides which comprise the polynucleotide. In some embodiments, multiple modifications are included in the modified nucleic acid or in one or more individual nucleoside or nucleotide. For example, modifications to a nucleoside may include one or more modifications to the nucleobase and the sugar. Modifications to the polynucleotides of the present disclosure may include any of those taught in, for example, International Publication No. WO2013/052523, the contents of which are incorporated herein by reference in its entirety.

[0257] As described herein “nucleoside” is defined as a compound containing a sugar molecule (e.g., a pentose or ribose) or a derivative thereof in combination with an organic base (e.g., a purine or pyrimidine) or a derivative thereof (also referred to herein as “nucleobase”). As described herein, “nucleotide” is defined as a nucleoside including a phosphate group.

[0258] In some embodiments, the modification may be on the internucleoside linkage (e.g., phosphate backbone). Herein, in the context of the polynucleotide backbone, the phrases “phosphate” and “phosphodiester” are used interchangeably. Backbone phosphate groups can be modified by replacing one or more of the oxygen atoms with a different substituent. Further, the modified nucleosides and nucleotides can include the wholesale replacement of an unmodified phosphate moiety with another internucleoside linkage. Examples of modified phosphate groups include, but are not limited to, phosphorothioate, phosphoroselenates, boranophosphates, boranophosphate esters, hydrogen phosphonates, phosphoramidates, phosphorodiamidates, alkyl or aryl phosphonates, and phosphotriesters. Phosphorodithioates have both non-linking oxygens replaced by sulfur. The phosphate linker can also be modified by the replacement of a linking oxygen with nitrogen (bridged phosphoramidates), sulfur (bridged phosphorothioates), and carbon (bridged methylene-phosphonates). Other modifications which may be used are taught in, for example, International Application No. WO2013/052523, the contents of which are incorporated herein by reference in their entirety.

[0259] Chemical modifications and/or substitution of the nucleotides or nucleobases of the polynucleotides of the disclosure which are useful in the present disclosure include any modified substitutes known in the art, for example, (±)1-(2-Hydroxypropyl)pseudouridine TP, (2R)-1-(2-Hydroxypropyl)pseudouridine TP, 1-(4-Methoxy-phenyl)pseudo-UTP, 2′-O-dimethyladenosine, 1,2′-O-dimethylguanosine, 1,2′-O-dimethylinosine, 1-Hexyl-pseudo-UTP, 1-Homoallylpseudouridine TP, 1-Hydroxymethylpseudouridine TP, 1-iso-propyl-pseudo-UTP, 1-Me-2-thio-pseudo-UTP, 1-Me-4-thio-pseudo-UTP, 1-Me-alpha-thio-pseudo-UTP, 1-Me-GTP, 2′-Amino-2′-deoxy-ATP, 2′-Amino-2′-deoxy-CTP, 2′-Amino-2′-deoxy-GTP, 2′-Amino-2′-deoxy-UTP, 2′-Azido-2′-deoxy-ATP, tubercidine, undermodified hydroxywybutosine, uridine 5-oxyacetic acid, uridine 5-oxyacetic acid methyl ester, wybutosine, wyosine, xanthine, Xanthosine-5′-TP, xylo-adenosine, zebularine, α-thio-adenosine, α-thio-cytidine, α-thio-guanosine, and/or α-thio-uridine.

[0260] Polynucleotides of the present disclosure may comprise one or more of the modifications taught herein. Different sugar modifications, base modifications, nucleotide modifications, and/or internucleoside linkages (e.g., backbone structures) may exist at various positions in the polynucleotide of the disclosure. One of ordinary skill in the art will appreciate that the nucleotide analogs or other modification(s) may be located at any position(s) of a polynucleotide such that the function of the polynucleotide is not substantially decreased. A modification may also be a 5′ or 3′ terminal modification. The polynucleotide may contain from about 1% to about 100% modified nucleotides (either in relation to overall nucleotide content, or in relation to one or more types of nucleotide, i.e. any one or more of A, G, U or C) or any intervening percentage (e.g., from 1% to 20%, from 1% to 25%, from 1% to 50%, from 1% to 60%, from 1% to 70%, from 1% to 80%, from 1% to 90%, from 1% to 95%, from 10% to 20%, from 10% to 25%, from 10% to 50%, from 10% to 60%, from 10% to 70%, from 10% to 80%, from 10% to 90%, from 10% to 95%, from 10% to 100%, from 20% to 25%, from 20% to 50%, from 20% to 60%, from 20% to 70%, from 20% to 80%, from 20% to 90%, from 20% to 95%, from 20% to 100%, from 50% to 60%, from 50% to 70%, from 50% to 80%, from 50% to 90%, from 50% to 95%, from 50% to 100%, from 70% to 80%, from 70% to 90%, from 70% to 95%, from 70% to 100%, from 80% to 90%, from 80% to 95%, from 80% to 100%, from 90% to 95%, from 90% to 100%, and from 95% to 100%).

[0261] In some embodiments, one or more codons of the polynucleotides of the present disclosure may be replaced with other codons encoding the native amino acid sequence to tune the expression of the SREs, through a process referred to as codon selection. Since mRNA codon, and tRNA anticodon pools tend to vary among organisms, cell types, sub cellular locations and over time, the codon selection described herein is a spatiotemporal (ST) codon selection.

[0262] In some embodiments of the disclosure, certain polynucleotide features may be codon optimized. Codon optimization refers to a process of modifying a nucleic acid sequence for enhanced expression in the host cell by replacing at least 1, 2, 3, 4, 5, 10, 15, 20, 25, 50 or more codons of the native sequence with codons that are most frequently used in the genes of that host cell while maintaining the native amino acid sequence. Codon usage may be measured using the Codon Adaptation Index (CAI) which measures the deviation of a coding polynucleotide sequence from a reference gene set. Codon usage tables are available at the Codon Usage Database (http://www.kazusa.or.jp/codon/) and the CAI can be calculated by EMBOSS CAI program (http://emboss.sourceforge.net/). Codon optimization methods are known in the art and may be useful in efforts to achieve one or more of several goals. These goals include to match codon frequencies in target and host organisms to ensure proper folding, bias nucleotide content to alter stability or reduce secondary structures, minimize tandem repeat codons or base runs that may impair gene construction or expression, customize transcriptional and translational control regions, insert or remove protein signaling sequences, remove/add post translation modification sites in encoded protein (e.g. glycosylation sites), add, remove or shuffle protein domains, insert or delete restriction sites, modify ribosome binding sites and degradation sites, to adjust translational rates to allow the various domains of the protein to fold properly, or to reduce or eliminate problem secondary structures within the polynucleotide. Codon optimization tools, algorithms and services are known in the art, and non-limiting examples include services from GeneArt (Life Technologies), DNA2.0 (Menlo Park Calif.), OptimumGene (GenScript, Piscataway, N.J.), algorithms such as but not limited to, DNAWorks v3.2.3, and/or proprietary methods. In one embodiment, a polynucleotide sequence or portion thereof is codon optimized using optimization algorithms. Codon options for each amino acid are well-known in the art as are various species table for optimizing for expression in that particular species.

[0263] In some embodiments of the disclosure, certain polynucleotide features may be codon optimized. For example, a preferred region for codon optimization may be upstream (5′) or downstream (3′) to a region which encodes a polypeptide. These regions may be incorporated into the polynucleotide before and/or after codon optimization of the payload encoding region or open reading frame (ORF).

[0264] After optimization (if desired), the polynucleotide components are reconstituted and transformed into a vector such as, but not limited to, plasmids, viruses, cosmids, and artificial chromosomes.

[0265] Spatiotemporal codon selection may impact the expression of the polynucleotides of the disclosure, since codon composition determines the rate of translation of the mRNA species and its stability. For example, tRNA anticodons to optimized codons are abundant, and thus translation may be enhanced. In contrast, tRNA anticodons to less common codons are fewer and thus translation may proceed at a slower rate. Presnyak et al. have shown that the stability of an mRNA species is dependent on the codon content, and higher stability and thus higher protein expression may be achieved by utilizing optimized codons (Presnyak et al. (2015) Cell 160, 1111-1124; the contents of which are incorporated herein by reference in their entirety). Thus, in some embodiments, ST codon selection may include the selection of optimized codons to enhance the expression of the SRES, effector modules and biocircuits of the disclosure. In other embodiments, spatiotemporal codon selection may involve the selection of codons that are less commonly used in the genes of the host cell to decrease the expression of the compositions of the disclosure. The ratio of optimized codons to codons less commonly used in the genes of the host cell may also be varied to tune expression.

[0266] In some embodiments, certain regions of the polynucleotide may be preferred for codon selection. For example, a preferred region for codon selection may be upstream (5′) or downstream (3′) to a region which encodes a polypeptide. These regions may be incorporated into the polynucleotide before and/or after codon selection of the payload encoding region or open reading frame (ORF).

[0267] The stop codon of the polynucleotides of the present disclosure may be modified to include sequences and motifs to alter the expression levels of the SREs, payloads and effector modules of the present disclosure. Such sequences may be incorporated to induce stop codon readthrough, wherein the stop codon may specify amino acids e.g. selenocysteine or pyrrolysine. In other instances, stop codons may be skipped altogether to resume translation through an alternate open reading frame. Stop codon read through may be utilized to tune the expression of components of the effector modules at a specific ratio (e.g. as dictated by the stop codon context). Examples of preferred stop codon motifs include UGAN, UAAN, and UAGN, where N is either C or U.

[0268] Polynucleotide modifications and manipulations can be accomplished by methods known in the art such as, but not limited to, site directed mutagenesis and recombinant technology. The resulting modified molecules may then be tested for activity using in vitro or in vivo assays such as those described herein, or any other suitable screening assay known in the art.

[0269] In some embodiments, polynucleotides of the disclosure may comprise two or more effector module sequences, or two or more payload sequences, which are in a pattern such as ABABAB or AABBAABBAABB or ABCABCABC or variants thereof repeated once, twice, or more than three times. In these patterns, each letter, A, B, or C represent a different effector module component.

[0270] In yet another embodiment, polynucleotides of the disclosure may comprise two or more effector module component sequences with each component having one or more SRE sequences (DD sequences), or two or more payload sequences. As a non-limiting example, the sequences may be in a pattern such as ABABAB or AABBAABBAABB or ABCABCABC or variants thereof repeated once, twice, or more than three times in each of the regions. As another non-limiting example, the sequences may be in a pattern such as ABABAB or AABBAABBAABB or ABCABCABC or variants thereof repeated once, twice, or more than three times across the entire polynucleotide. In these patterns, each letter, A, B, or C represent a different sequence or component.

[0271] According to the present disclosure, polynucleotides encoding distinct biocircuits, effector modules, SREs and payload constructs may be linked together through the 3′-end using nucleotides which are modified at the 3′-terminus. Chemical conjugation may be used to control the stoichiometry of delivery into cells. Polynucleotides can be designed to be conjugated to other polynucleotides, dyes, intercalating agents (e.g. acridines), cross-linkers (e.g. psoralene, mitomycin C), porphyrins (TPPC4, texaphyrin, Sapphyrin), polycyclic aromatic hydrocarbons (e.g., phenazine, dihydrophenazine), artificial endonucleases (e.g. EDTA), alkylating agents, phosphate, amino, mercapto, PEG (e.g., PEG-40K), MPEG, [MPEG]₂, polyamino, alkyl, substituted alkyl, radiolabeled markers, enzymes, haptens (e.g. biotin), transport/absorption facilitators (e.g., aspirin, vitamin E, folic acid), synthetic ribonucleases, proteins, e.g., glycoproteins, or peptides, e.g., molecules having a specific affinity for a co-ligand, or antibodies e.g., an antibody, that binds to a specified cell type such as a cancer cell, endothelial cell, or bone cell, hormones and hormone receptors, non-peptidic species, such as lipids, lectins, carbohydrates, vitamins, cofactors, or a drug. As non-limiting examples, they may be conjugates with other immune conjugates.

[0272] In some embodiments, the compositions of the polynucleotides of the disclosure may be generated by combining the various components of the effector modules using the Gibson assembly method. The Gibson assembly reaction consists of three isothermal reactions, each relying on a different enzymatic activity including a 5′ exonuclease which generates long overhangs, a polymerase which fills in the gaps of the annealed single strand regions and a DNA ligase which seals the nicks of the annealed and filled-in gaps. Polymerase chain reactions are performed prior to Gibson assembly which may be used to generate PCR products with overlapping sequence. These methods can be repeated sequentially, to assemble larger and larger molecules. For example, the method can comprise repeating a method as above to join a second set of two or more DNA molecules of interest to one another, and then repeating the method again to join the first and second set DNA molecules of interest, and so on. At any stage during these multiple rounds of assembly, the assembled DNA can be amplified by transforming it into a suitable microorganism, or it can be amplified in vitro (e.g., with PCR).

### Molecular Switches in Biocircuits, Genetic Circuits

### Molecular Switches

[0273] In some embodiments, the DDs described herein can include aspects of molecular switches. Alternatively or additionally, molecular switches can be constructed using DDs as described. The term “molecular switch” as used herein refers to any molecule that can be reversibly shifted between two or more stable states in response to a stimulus (e.g., a ligand). Molecular switches can be employed in biocircuits or genetic circuits, i.e., engineered input-responsive biological circuits.

[0274] In some embodiments, molecular switches can be RNA-based switches. As a non-limiting example, a DD-regulated effector module can be provided in an RNA molecule that comprises a coding sequence for a destabilization domain fused to a translational repressor such as, for example, L7Ae, a kink-turn (K-turn) motif in the 5′ UTR of a payload mRNA, and the coding sequence for the payload (e.g., peptide or protein) (see, e.g., International Patent Publication NO: WO2016040395, the contents of which are incorporated herein by reference in their entirety). L7Ae is an archaeal protein that binds K-turn and K-loop motifs with high affinity. In the absence of a ligand that stabilizes the destabilization domain, fusion L7Ae protein is degraded and the payload peptide or protein is expressed (ON state), whereas in the presence of the ligand, the fusion L7Ae protein is not destabilized and binds to the K-turn motif and represses expression of the payload peptide or protein (OFF state). Other translational regulation systems can also be used, such as, but not limited to, MS2-tethered repressors, Tet repressors, and microRNAs. Other uses of tunable expression repressors are contemplated; for example, effector modules comprising DD-regulated repressor payloads can be used to control inducible expression of transgenes, including to block background or “leaky” expression of transgenes (see U.S. Pat. No. 9,388,425, the contents of which are incorporated herein by reference in their entirety).

[0275] DD-regulated effector modules as described herein can be utilized to establish tunable bistable genetic toggles, wherein ligand-mediated stabilization and/or destabilization of a SRE appended, for example, to a payload of interest stably shifts expression of a gene of interest between on and off states (see U.S. Pat. No. 6,841,376, the contents of which are incorporated herein by reference in their entirety). Trans-acting SREs can also be utilized to tunably transition cis-acting self-repressive expression cassettes (see U.S. Pat. No. 10,208,312, the contents of which are incorporated herein by reference in their entirety).

[0276] RNA-based molecular switches can be synthetic RNA. In some cases, such RNA molecules can comprise modified bases (modRNA) or self-replicating RNAs (replicons). RNA-based molecular switches can be responsive to small molecules, for example, small molecule-responsive RNA binding proteins (RBPs) (e.g., Wagner et al., Nat. Chem. Bio. 2018 14:1043-50). In this way, effector modules as described herein can be RBPs useful in regulating RNA circuits.

[0277] In some embodiments, molecular switches can be switched on/off via dimerization. For example, a first effector module can comprise a DD-regulated SRE which is a first member of a dimerization pair and optionally a first payload, and a second effector module can comprise a DD-regulated SRE which is second member of a dimerization pair and optionally a second payload, wherein the two members of the dimerization pair dimerize upon addition of a dimerization ligand. In some embodiments, dimerization can restore stability of the members of the dimerization pair and/or the attached payloads. Dimerization induces interaction, whether direct or indirect, of the two payloads to create a desired effect. In some embodiments, dimerization can induce degradation of the dimerization pair and/or the attached payloads. For example, bivalent small molecules can dimerize two molecules of an E3 ubiquitin ligase to induce self-degradation (see, e.g., Maniaci et al., Nat Commun. 2017 Oct. 10; 8(1):830, the contents of which are incorporated herein by reference in their entirety). A dimerization pair can comprise, or be derived from, for example, an antibody and its antigen, two fragments of an antibody, a ligand-binding domain and a cognate receptor (e.g., any of those described in International Patent Publication No: WO2017120546, the contents of which are incorporated herein by reference in their entirety), and an E3 ubiquitin ligase and a substrate (e.g., as described in Maniaci et al.).

[0278] In some embodiments, molecular switches can be conditionally active in specific cell types or under specific cellular conditions. For example, the stimulus required to stimulate the DD-regulated SREs of the effector modules may only be present in a particular cell type or under a particular cellular condition. This allows various applications, such as cell-type specific delivery of a payload, or detection of a particular cellular target. Based on this property, biocircuits or effector modules described herein can be developed as biosensors. For example, a DD can be fused to a reporter protein (e.g., GFP). Such DD, in the context of an SRE, can contain mutations such that the SRE is conditionally stable only in the presence of a stabilizing ligand which is also the target to be detected. When the target is present in the cell, the fusion protein is stabilized and the reporter activity can be detected (see, e.g., International Patent Publication Nos: WO2009137136, WO2017048316, and WO2017156238; and U.S. Pat. Nos. 8,329,889 and 9,766,255, the contents of each of which are incorporated herein by reference in their entireties). In some embodiments, genetic circuits may include a conditional NF-kB (nuclear factor kappa-B) responsive promoter driving expression of the effector modules described herein. Such circuits are described in the International Patent Publication WO2018170390, the contents of which are incorporated by reference in their entirety.

[0279] In some embodiments, engineered cell circuits that enable multifactorial modulation within and/or near a tumor (a tumor microenvironment (TME)) may be utilized. Such circuits are described in the International Patent Publication WO2018191619, the contents of which are incorporated by reference in their entirety.

[0280] In some embodiments, the biocircuits described herein may include SynNotch switches that include a synthetic notch (SynNotch) receptors. SynNotch receptors contain the core regulatory domain of the juxtacrine signaling receptor Notch, linked to a chimeric extracellular recognition domain (such as but not limited to an scFv and a chimeric intracellular transcriptional domain. Upon interacting with the cognate ligand which may be present on a neighboring cell, the SynNotch receptor undergoes cleavage of the transmembrane region, releasing the intracellular transcriptional domain to enter the nucleus and drive the expression of user-specified target genes. SynNotch circuits may be generated by linking one or more transcriptional outputs to SynNotch receptors. Any of the SynNotch circuits described by Toda et al. may be used in the biocircuits described herein (Programming self-organizing multicellular structures with synthetic cell-cell signaling Science 13 Jul. 2018: Vol. 361, Issue 6398, pp. 156-162; the contents of which are herein incorporated by reference in their entirety).

[0281] In some embodiments, the biocircuits described herein may include a proteolytic switch. Such switches may include a set of split proteases with highly specific orthogonal cleavage motifs which may be combined with cleavage sites and orthogonal coiled coils dimerizing domains strategically positioned in payloads of interest. Proteolytic cleavage induces conformational rearrangements within and between the CC modules, thus leading to the reconstitution of downstream functional protein domains resulting in a cellular outcome. Split-protease-cleavable orthogonal-CC-based (SPOC) logic circuits described by Fink et al. may be utilized in the biocircuits described herein (Design of fast proteolysis-based signaling and logic circuits in mammalian cells, Nat. Chem. Bio 15, 115-122 (2019); the contents of which are herein incorporated by reference in their entirety).

[0282] In one embodiment, the molecular switches may be based on chemically induced proximity (CIP) systems, wherein two proteins are colocalized upon addition of a bridging small molecule. In some aspects, the molecular switches may be based on chemically disrupted proximity (CDP) systems, which may include systems that allow the interaction of two basally colocalized proteins to be rapidly disrupted with a small. As non-limiting example, the interaction between the antiapoptotic protein BCL-xL and a BH3 peptide may be used as a chemically disruptable proximity system for intramolecularly controlling the activities of various enzymes. Intermolecular CDP systems that allow a basally localized activity to be chemically disrupted may be used as off switches. In one embodiment, the CDP system may be based on the hepatitis C virus protease (HCVp) NS3a and its interaction with a peptide inhibitor. Clinically approved protease inhibitors that efficiently disrupt the NS3a/peptide interaction may be utilized as bio-orthogonal inputs for this system.

[0283] In some embodiments, Zapalog, a small molecule dimerizer that undergoes photolysis when exposed to blue light. Zapalog dimerizes any two proteins tagged with the FKBP and DHFR domains until exposure to light causes its photolysis. Dimerization can be repeatedly restored with uncleaved Zapalog. In some embodiments, molecular switches described herein may be heterodimerization switches. Heterodimerization may include chemical induced dimerization domains (CIDs) with two orthogonal ligand moieties that exhibit high specificity and affinity for their binding domains and lack alternative endogenous binding partners in mammalian cells at useful concentrations. The CIDs may be membrane permeable. In some aspects, the linker may be long enough to allow both binding domains to be simultaneously engaged without steric interference. The linker may in some instances be a photocleavable linker. Linkers that respond to a wavelength that is neither cytotoxic nor interferes with imaging common fluorophores may be preferentially selected. In some embodiments, the heterodimerization switches may include FKBP and DHFR domains and Zapalog, a small molecule dimerizer that undergoes photolysis when exposed to blue light. Zapalog may dimerize any two proteins tagged with the FKBP and DHFR domains until exposure to light causes its photolysis. Dimerization may be restored with uncleaved Zapalog. In some embodiments, Zapalog may include the heterodimerizer trimethoprim-synthetic ligand of FK506-binding protein (TMP-SLF), wherein the SLF portion binds the FK506-binding protein (FKBP) domain of one chimeric partner; the TMP portion binds the Escherichia coli dihydrofolate reductase (DHFR) domain of another. To render dimerization reversible with light, the alkyl linker between TMP and SLF may be replaced with a dialkoxynitrobenzyl (DANB) moiety. Two payloads described herein are tagged with DHFR and FKBP domains. Addition of Zapalog may induce dimerization of the tagged proteins. Exposure to 405 nm light may photocleave Zapalog, causing rapid dissociation of the dimer. Dimerization may be restored by the addition of uncleaved Zapalog which may outcompete the photolyzed Zapalog moieties. Any of the ligands described herein may be utilized to build Zapalog-like ligands and any of the SREs described herein may be used to generate CIDs.

### Boolean Switches

[0284] DD-regulated effector modules described herein can also be incorporated into the design of cellular Boolean switches. As used herein, a Boolean switch refers to a circuit that is designed to perform a logical operation based on one or more inputs and which produces an output. Logical operations performed by Boolean switches include but are not limited to, AND, OR, NOR, NAND, NOT, IMPLY, NIMPLY, XOR, and XNOR. AND and OR gates represent the most fundament logical operations, where OR represents a scenario where any of the one or more inputs is required to produce an output, and AND represents a scenario where all of the inputs are required to generate an output. Compound Boolean switches that consist of multiple logical operations can also be generated using effector modules as described herein. In some embodiments, biocircuits and/or any of their components can represent one or more inputs in a Boolean switch. In other embodiments, DDs described herein can be combined with switches known in the art to generate Boolean switches. The output of a Boolean switch can depend on the payload of the effector module utilized. In one embodiment, the DDs and/or the biocircuits can be utilized in NOT gates. NOT gates are inverters whose function is to invert the input i.e. stimulus. In some embodiments, the NOT gates described herein can be used to convert an immunosuppressive stimulus into an immune potentiating output such as the expression and/or function of an immune potentiating (promoting) payload. In another non-limiting example, an AND based Boolean switch may be generated where a first input comprises a biocircuit with gene editing nuclease, Cas9, as the payload and a second input comprises a biocircuit with transcriptional activator, VPR, as the payload. In the presence of the target gene guide RNA, addition of the stimuli to both inputs is required for the transcriptional activation of the target gene (see Gao Y et al. (2016) Nat Methods, 13(12):1043-1049; the contents of which are incorporated herein by reference in their entirety).

### Safety Switches

[0285] In some embodiments, effector module payloads can comprise DD-regulated safety switches that can eliminate adoptively transferred cells in the case of severe toxicity, thereby mitigating the adverse effects of T cell therapy. Adoptively transferred T cells in immunotherapy can attack normal cells in response to normal tissue expression of TAA. Even on-tumor target activity of adoptively transferred T cells can result in toxicities such as tumor lysis syndrome, cytokine release syndrome and the related macrophage activation syndrome. Safety switches can be utilized to eliminate inappropriately activated adoptively transferred cells by induction of apoptosis or by immunosurveillance.

[0286] In some embodiments, DD-regulated payloads can comprise inducible killer/suicide genes that act as a safety switch. The killer/suicide gene when introduced into adoptively transferred immune cells, could control their alloreactivity. The killer/suicide gene can be an apoptotic gene (e.g., any Caspase gene) which allows conditional apoptosis of the transduced cells by administration of a non-therapeutic ligand of the SRE (e.g., DD).

[0287] In some embodiments, the payload can be Caspase 9. In some instances, Caspase 9 can be modified to have low basal expression and lacking the caspase recruitment domain (CARD) (SEQ ID NO. 26 and SEQ ID NO. 28 of U.S. Pat. No. 9,434,935B2; the contents of which are incorporated by reference in their entirety). In some embodiments, the safety switches may also be referred to as genetic erasers. In one aspect, the genetic eraser may include a selection marker such as those described in International Patent Publication, WO2018022747, the contents of which are incorporated by reference in their entirety.

[0288] In some embodiments, DDs, SREs and/or payloads of effector modules as described can include molecular safeguards for T-cell immunotherapies. Molecular safeguards can allow, in the event of side-effects, selective depletion of engineered T-cells (e.g., CAR T-cells). Molecular safeguards can respond to activating agents which trigger on-demand depletion of the engineered T-cells. Non-limiting examples of molecular safeguards to be used in combination with CAR expression include CD20, which respond to the antibody Rituximab; RQR8, which responds to the antibody Rituximab; huEGFRtr, which responds to the antibody Erbitux; HSV-TK, which responds to the small molecule Ganciclovir; ICasp9, which responds to the small molecule Rimudicid; and CubiCAR, which is a CAR architecture with built-in safeguard CD20 that responds to the antibody Rituximab (Valton et al., Scientific Reports volume 8, Article number: 8972 (2018), the contents of which are incorporated herein by reference in their entirety).

[0289] In one embodiment, the payload is a suicide gene system, iCasp9/Chemical induced dimerization (CID) system which consists of a polypeptide derived from the Caspase9 gene fused to a drug binding domain derived from the human FK506 protein. Administration of bioinert, small molecule AP1903 (rimiducid), induces cross linking of the drug binding domains and dimerization of the fusion protein and in turn the dimerization of Caspase 9. This results in the activation of downstream effector Caspase 3 and subsequent induction of cellular apoptosis (Straathof et al., Blood, 2005, 105: 4247-4254; incorporated herein by reference in its entirety). Preclinical trials using CART including an iCasp9 gene have shown effective elimination of CAR T cells in vivo in mouse models and demonstrate the potential efficacy of this approach. (Budde et al, Plos One, 2013, 8: e82742.10.1371; Hoyos et al., Leukemia, 2010; 24(6):1160-1170). In one embodiment, the payload can comprise Caspase 9. In one aspect, the effector module can be a DD-Caspase9 fusion polypeptide.

### Regulatory Switches

[0290] The utility of adoptive cell therapy (ACT) has been limited by the high incidence of graft versus host disease (GVHD). GVHD occurs when adoptively transferred T cells elicit an immune response resulting in host tissue damage. Recognition of host antigens by the graft cells triggers a proinflammatory cytokine storm cascade that signifies acute GVHD. GVHD is characterized as an imbalance between the effector and the regulatory arms of the immune system. In some embodiments, the payloads described herein can be used as regulatory switches. As used herein “regulatory switch” refers proteins, which when expressed in target cells increase tolerance to the graft by enhancing the regulatory arm of the immune system.

[0291] In one embodiment, regulatory switches can include DD-regulated payloads that preferentially promote the expansion of regulatory T (Treg cells). Tregs are a distinct population of cells that are positively selected on high affinity ligands in the thymus and play an important role in the tolerance to self-antigens. In addition, Tregs have also been shown to play a role in peripheral tolerance to foreign antigens. Since Tregs promote immune tolerance, expansion of Tregs with compositions as described herein can be desirable to limit GVHD.

[0292] In some embodiments, the regulatory switch can include, but is not limited to T regs activation factors such NF-kappa B (NFKB or NFκB) FOXO, nuclear receptor Nr4a, Retinoic acid receptor alpha, NFAT, AP-1 and SMAD. Such factors can result in the expression of Fork headbox P3 (FOXP3) in T cells resulting in the activation of the regulatory T cell program and the expansion of T cells.

[0293] In some embodiments, the regulatory switch can be FOXP3, a transcriptional regulator in T cells. A function of FOXP3 is to suppress the function of NFAT, which leads to the suppression of expression of many genes including IL2 and effector T-cell cytokines. FOXP3 acts also as a transcription activator for genes such as CD2S, Cytotoxic T-Lymphocyte Antigen Cytotoxic T-Lymphocyte Antigen 4 (CTLA4), glucocorticoid-induced TNF receptor family gene (GITR) and folate receptor 4. FOXP3 also inhibits the differentiation of IL17 producing helper T-cells (Th17) by antagonizing RORC (RAR related orphan receptor C). Isoforms of FOXP3 lacking exon2 (FOXP3 delta 2) or exon 7 (FOXP3 delta 7) can also be used as regulatory switches. In one aspect, an effector module as described herein can be a DD-FOXP3 fusion polypeptide.

[0294] Regulatory switches can be designed using Boolean switches, e.g. NOT gates. For example, an immunosuppressive signal can be converted into an immune potentiating output such as expression and/or function of an immune potentiating (promoting) payload. The stimulus of a NOT gate can be, for example, phosphorylated SHP2, a signaling molecule produced by the activation of the immunosuppressive PD1 signaling pathway. Another non-limiting example for a NOT gate can be metabolite kynurenine, which is produced by the indoleamine 2,3-dioxygenase pathway.

### Epigenetic Switches

[0295] In some embodiments, the DDs described herein can include epigenetic switches. Alternatively or additionally, epigenetic switches can be constructed using DDs described herein. Epigenetic switches utilize chemical modification of nucleic acids, the propagation, and the actuation of the chemical modifications. In some embodiments, the epigenetic switches may be built by utilizing chemical modifications of nucleic acids that are naturally found in bacterial such as 6-methyl-adenosine (m6A). m6A switches are described in Park et al. 2019 (Engineering Epigenetic Regulation Using Synthetic Read-Write Modules. Cell. January 10; 176(1-2):227-238.; the contents of which are incorporated by reference in their entirety). The epigenetic circuits described herein may include a “writer” protein that adds m6A at specific DNA sequences. The writer module may be based on a methylase such as but not limited to dam methylase, which adds m6A to GATC sequences in Escherichia coli and is active when expressed in human cells. By fusing dam to a zinc finger proteins (ZF), allows targeting m6A methylation to specific loci. Specificity of the dam methylases to ZF targeted sequences may be achieved using by engineering mutations that reduce the catalytic activity of dam. In some embodiments, the epigenetic switch may include a “reader” protein that can recognize the m6A methylation marks. In one aspect, the reader domain may be the binding domain of the restriction enzyme DpnI. This reader domain (RD) may be fused to DAM to propagate m6A marks at nearby and complementary GATC sites in DNA, thereby spreading methylation across a locus and cell divisions. The RD may also be fused to proteins that activate or repress transcription (EDs), thus creating m6A-dependent transcriptional regulation.

### III. Pharmaceutical Compostions and Formulations

[0296] The present disclosure further provides pharmaceutical compositions comprising the DDs of the disclosure, one or more stimuli, effector modules and biocircuit systems comprising the same, and optionally at least one pharmaceutically acceptable excipient or inert ingredient.

[0297] As used herein the term “pharmaceutical composition” refers to a preparation of activate agents (e.g., DDs, ligands of the DDs, effector modules and biocircuits), other components, vectors, cells and described herein, or pharmaceutically acceptable salts thereof, optionally with other chemical components such as physiologically suitable carriers and excipients. The pharmaceutical compositions of the disclosure comprise an effective amount of one or more active compositions of the disclosure. The preparation of a pharmaceutical composition that contains at least one composition of the present disclosure and/or an additional active ingredient will be known to those skilled in the art in light of the present disclosure, as exemplified by Remington's Pharmaceutical Sciences, 18th Ed. Mack Printing Company, 1990, incorporated herein by reference.

[0298] The term “excipient” or “inert ingredient” refers to an inactive substance added to a pharmaceutical composition and formulation to further facilitate administration of an active ingredient. For the purposes of the present disclosure, the phrase “active ingredient” generally refers to any one or more biocircuits, effector modules, DDs, stimuli and payloads (i.e., immunotherapeutic agents), other components, vectors, and cells to be delivered as described herein. The phrases “pharmaceutically acceptable” refers to molecular entities and compositions that do not produce an adverse, allergic or other untoward reaction when administered to an animal, such as, for example, a human, as appropriate.

[0299] In some embodiments, pharmaceutical compositions and formulations are administered to humans, human patients or subjects. Although the descriptions of pharmaceutical compositions provided herein are principally directed to pharmaceutical compositions which are suitable for administration to humans, it will be understood by the skilled artisan that such compositions are generally suitable for administration to any other animal, e.g., to non-human animals, e.g. non-human mammals. Subjects to which administration of the pharmaceutical compositions is contemplated include, but are not limited to, non-human mammals, including agricultural animals such as cattle, horses, chickens and pigs, domestic animals such as cats, dogs, or research animals such as mice, rats, rabbits, dogs and non-human primates. It will be understood that, for human administration, preparations should meet sterility, pyrogenicity, general safety and purity standards as required by FDA Office of Biological Standards.

[0300] A pharmaceutical composition and formulation in accordance with the disclosure may be prepared, packaged, and/or sold in bulk, as a single unit dose, and/or as a plurality of single unit doses. As used herein, a “unit dose” is discrete amount of the pharmaceutical composition comprising a predetermined amount of the active ingredient. The amount of the active ingredient is generally equal to the dosage of the active ingredient which would be administered to a subject and/or a convenient fraction of such a dosage such as, for example, one-half or one-third of such a dosage.

[0301] The compositions of the present disclosure may be formulated in any manner suitable for delivery. The formulation may be, but is not limited to, nanoparticles, poly (lactic-co-glycolic acid) (PLGA) microspheres, lipidoids, lipoplex, liposome, polymers, carbohydrates (including simple sugars), cationic lipids and combinations thereof.

[0302] In one embodiment, the formulation is a nanoparticle which may comprise at least one lipid. The lipid may be selected from, but is not limited to, DLin-DMA, DLin-K-DMA, 98N12-5, C12-200, DLin-MC3-DMA, DLin-KC2-DMA, DODMA, PLGA, PEG, PEG-DMG and PEGylated lipids. In another aspect, the lipid may be a cationic lipid such as, but not limited to, DLin-DMA, DLin-D-DMA, DLin-MC3-DMA, DLin-KC2-DMA and DODMA.

[0303] For polynucleotides of the disclosure, the formulation may be selected from any of those taught, for example, in International Application PCT/US2012/069610, the contents of which are incorporated herein by reference in its entirety.

[0304] Relative amounts of the active ingredient, the pharmaceutically acceptable excipient or inert ingredient, and/or any additional ingredients in a pharmaceutical composition in accordance with the disclosure will vary, depending upon the identity, size, and/or condition of the subject treated and further depending upon the route by which the composition is to be administered. By way of example, the composition may comprise between 0.1% and 100%, e.g., between 0.5 and 50%, between 1-30%, between 5-80%, at least 80% (w/w) active ingredient.

[0305] Efficacy of treatment or amelioration of disease can be assessed, for example by measuring disease progression, disease remission, symptom severity, reduction in pain, quality of life, dose of a medication required to sustain a treatment effect, level of a disease marker or any other measurable parameter appropriate for a given disease being treated or targeted for prevention. It is well within the ability of one skilled in the art to monitor efficacy of treatment or prevention by measuring any one of such parameters, or any combination of parameters. In connection with the administration of compositions of the present disclosure, “effective against” for example a cancer, indicates that administration in a clinically appropriate manner results in a beneficial effect for at least a statistically significant fraction of patients, such as an improvement of symptoms, a cure, a reduction in disease load, reduction in tumor mass or cell numbers, extension of life, improvement in quality of life, or other effect generally recognized as positive by medical doctors familiar with treating the particular type of cancer.

[0306] A treatment or preventive effect is evident when there is a statistically significant improvement in one or more parameters of disease status, or by a failure to worsen or to develop symptoms where they would otherwise be anticipated. As an example, a favorable change of at least 10% in a measurable parameter of disease, and preferably at least 20%, 30%, 40%, 50% or more can be indicative of effective treatment. Efficacy for a given composition or formulation of the present disclosure can also be judged using an experimental animal model for the given disease as known in the art. When using an experimental animal model, efficacy of treatment is evidenced when a statistically significant change is observed.

[0307] In some embodiments, the polypeptides of the disclosure may be delivered to the cell directly. In one embodiment, the polypeptides of the disclosure may be delivered using synthetic peptides comprising an endosomal leakage domain (ELD) fused to a cell penetration domain (CLD). The polypeptides of the disclosure are co introduced into the cell with the ELD-CLD-synthetic peptide. ELDs facilitate the escape of proteins that are trapped in the endosome, into the cytosol. Such domains are derived proteins of microbial and viral origin and have been described in the art. CPDs allow the transport of proteins across the plasma membrane and have also been described in the art. The ELD-CLD fusion proteins synergistically increase the transduction efficiency when compared to the co-transduction with either domain alone. In some embodiments, a histidine rich domain may optionally be added to the shuttle construct as an additional method of allowing the escape of the cargo from the endosome into the cytosol. The shuttle may also include a cysteine residue at the N or C terminus to generate multimers of the fusion peptide. Multimers of the ELD-CLD fusion peptides generated by the addition of cysteine residue to the terminus of the peptide show even greater transduction efficiency when compared to the single fusion peptide constructs. The polypeptides of the disclosure may also be appended to appropriate localization signals to direct the cargo to the appropriate sub-cellular location e.g. nucleus. In some embodiments any of the ELDs, CLDs or the fusion ELD-CLD synthetic peptides taught in the International Patent Publication, WO2016161516 and WO2017175072 may be useful in the present disclosure (the contents of each of which are herein incorporated by reference in their entirety).

### Therapeutic Uses

### 1. Cancer

[0308] Various cancers may be treated with pharmaceutical compositions, biocircuits, biocircuit components, effector modules including their SREs or payloads of the present disclosure. As used herein, the term “cancer” refers to any of various malignant neoplasms characterized by the proliferation of anaplastic cells that tend to invade surrounding tissue and metastasize to new body sites and also refers to the pathological condition characterized by such malignant neoplastic growths. Cancers may be tumors or hematological malignancies, and include but are not limited to, all types of lymphomas/leukemias, carcinomas and sarcomas, such as those cancers or tumors found in the anus, bladder, bile duct, bone, brain, breast, cervix, colon/rectum, endometrium, esophagus, eye, gallbladder, head and neck, liver, kidney, larynx, lung, mediastinum (chest), mouth, ovaries, pancreas, penis, prostate, skin, small intestine, stomach, spinal marrow, tailbone, testicles, thyroid and uterus.

[0309] Types of carcinomas which may be treated with the compositions of the present disclosure include, but are not limited to, papilloma/carcinoma, choriocarcinoma, endodermal sinus tumor, teratoma, adenoma/adenocarcinoma, melanoma, fibroma, lipoma, leiomyoma, rhabdomyoma, mesothelioma, angioma, osteoma, chondroma, glioma, lymphoma/leukemia, squamous cell carcinoma, small cell carcinoma, large cell undifferentiated carcinomas, basal cell carcinoma and sinonasal undifferentiated carcinoma.

[0310] Types of carcinomas which may be treated with the compositions of the present disclosure include, but are not limited to, soft tissue sarcoma such as alveolar soft part sarcoma, angiosarcoma, dermatofibrosarcoma, desmoid tumor, desmoplastic small round cell tumor, extraskeletal chondrosarcoma, extraskeletal osteosarcoma, fibrosarcoma, hemangiopericytoma, hemangiosarcoma, Kaposi's sarcoma, leiomyosarcoma, liposarcoma, lymphangiosarcoma, lymphosarcoma, malignant fibrous histiocytoma, neurofibrosarcoma, rhabdomyosarcoma, synovial sarcoma, and Askin's tumor, Ewing's sarcoma (primitive neuroectodermal tumor), malignant hemangioendothelioma, malignant schwannoma, osteosarcoma, and chondrosarcoma.

[0311] As a non-limiting example, the carcinoma which may be treated may be Acute granulocytic leukemia, Acute lymphocytic leukemia, Acute myelogenous leukemia, Adenocarcinoma, Adenosarcoma, Adrenal cancer, Adrenocortical carcinoma, Anal cancer, Anaplastic astrocytoma, Angiosarcoma, Appendix cancer, Astrocytoma, Basal cell carcinoma, B-Cell lymphoma), Bile duct cancer, Bladder cancer, Bone cancer, Bowel cancer, Brain cancer, Brain stem glioma, Brain tumor, Breast cancer, Carcinoid tumors, Cervical cancer, Cholangiocarcinoma, Chondrosarcoma, Chronic lymphocytic leukemia, Chronic myelogenous leukemia, Colon cancer, Colorectal cancer, Craniopharyngioma, Cutaneous lymphoma, Cutaneous melanoma, Diffuse astrocytoma, Ductal carcinoma in situ, Endometrial cancer, Ependymoma, Epithelioid sarcoma, Esophageal cancer, Ewing sarcoma, Extrahepatic bile duct cancer, Eye cancer, Fallopian tube cancer, Fibrosarcoma, Gallbladder cancer, Gastric cancer, Gastrointestinal cancer, Gastrointestinal carcinoid cancer, Gastrointestinal stromal tumors, General, Germ cell tumor, Glioblastoma multiforme, Glioma, Hairy cell leukemia, Head and neck cancer, Hemangioendothelioma, Hodgkin lymphoma, Hodgkin's disease, Hodgkin's lymphoma, Hypopharyngeal cancer, Infiltrating ductal carcinoma, Infiltrating lobular carcinoma, Inflammatory breast cancer, Intestinal Cancer, Intrahepatic bile duct cancer, Invasive/infiltrating breast cancer, Islet cell cancer, Jaw cancer, Kaposi sarcoma, Kidney cancer, Laryngeal cancer, Leiomyosarcoma, Leptomeningeal metastases, Leukemia, Lip cancer, Liposarcoma, Liver cancer, Lobular carcinoma in situ, Low-grade astrocytoma, Lung cancer, Lymph node cancer, Lymphoma, Male breast cancer, Medullary carcinoma, Medulloblastoma, Melanoma, Meningioma, Merkel cell carcinoma, Mesenchymal chondrosarcoma, Mesenchymous, Mesothelioma, Metastatic breast cancer, Metastatic melanoma, Metastatic squamous neck cancer, Mixed gliomas, Mouth cancer, Mucinous carcinoma, Mucosal melanoma, Multiple myeloma, Nasal cavity cancer, Nasopharyngeal cancer, Neck cancer, Neuroblastoma, Neuroendocrine tumors, Non-Hodgkin lymphoma, Non-Hodgkin's lymphoma, Non-small cell lung cancer, Oat cell cancer, Ocular cancer, Ocular melanoma, Oligodendroglioma, Oral cancer, Oral cavity cancer, Oropharyngeal cancer, Osteogenic sarcoma, Osteosarcoma, Ovarian cancer, Ovarian epithelial cancer, Ovarian germ cell tumor, Ovarian primary peritoneal carcinoma, Ovarian sex cord stromal tumor, Paget's disease, Pancreatic cancer, Papillary carcinoma, Paranasal sinus cancer, Parathyroid cancer, Pelvic cancer, Penile cancer, Peripheral nerve cancer, Peritoneal cancer, Pharyngeal cancer, Pheochromocytoma, Pilocytic astrocytoma, Pineal region tumor, Pineoblastoma, Pituitary gland cancer, Primary central nervous system lymphoma, Prostate cancer, Rectal cancer, Renal cell cancer, Renal pelvis cancer, Rhabdomyosarcoma, Salivary gland cancer, Sarcoma, Sarcoma, bone, Sarcoma, soft tissue, Sarcoma, uterine, Sinus cancer, Skin cancer, Small cell lung cancer, Small intestine cancer, Soft tissue sarcoma, Spinal cancer, Spinal column cancer, Spinal cord cancer, Spinal tumor, Squamous cell carcinoma, Stomach cancer, Synovial sarcoma, T-cell lymphoma), Testicular cancer, Throat cancer, Thymoma/thymic carcinoma, Thyroid cancer, Tongue cancer, Tonsil cancer, Transitional cell cancer, Transitional cell cancer, Transitional cell cancer, Triple-negative breast cancer, Tubal cancer, Tubular carcinoma, Ureteral cancer, Ureteral cancer, Urethral cancer, Uterine adenocarcinoma, Uterine cancer, Uterine sarcoma, Vaginal cancer, and Vulvar cancer.

### 2. Combination Treatments

[0312] The disclosure further relates to the use of pharmaceutical compositions, biocircuits, biocircuit components, effector modules including their SREs or payloads of the present disclosure for treating one or more forms of cancer, in combination with other pharmaceuticals and/or other therapeutic methods, e.g., with known pharmaceuticals and/or known therapeutic methods, such as, for example, those which are currently employed for treating these disorders. For example, the pharmaceutical compositions, biocircuits, biocircuit components, effector modules including their SREs or payloads of the present disclosure can also be administered in conjunction with one or more additional anti-cancer treatments, such as biological, chemotherapy and radiotherapy. Accordingly, a treatment can include, for example, imatinib (Gleevac), all-trans-retinoic acid, a monoclonal antibody treatment (gemtuzumab, ozogamicin), chemotherapy (for example, chlorambucil, prednisone, prednisolone, vincristine, cytarabine, clofarabine, farnesyl transferase inhibitors, decitabine, inhibitors of MDR1), rituximab, interferon-α, anthracycline drugs (such as daunorubicin or idarubicin), L-asparaginase, doxorubicin, cyclophosphamide, doxorubicin, bleomycin, fludarabine, etoposide, pentostatin, or cladribine), bone marrow transplant, stem cell transplant, radiation therapy, anti-metabolite drugs (methotrexate and 6-mercaptopurine), or any of the antibodies taught herein such as those in Table 6 of the co-pending commonly owned U.S. Ser. No. 62/320,864 filed on Apr. 11, 2016, or in U.S. Provisional Application No. 62/466,596 filed Mar. 3, 2017 and the International Publication WO2017/180587, the contents of each of which are incorporated herein by reference in their entirety or combinations thereof.

3. Combinations with Radiation

[0313] Radiation therapy (also called radiotherapy, X-ray therapy, or irradiation) is the use of ionizing radiation to kill cancer cells and shrink tumors. Radiation therapy can be administered externally via external beam radiotherapy (EBRT) or internally via brachytherapy. The effects of radiation therapy are localized and confined to the region being treated. Radiation therapy may be used to treat almost every type of solid tumor, including cancers of the brain, breast, cervix, larynx, lung, pancreas, prostate, skin, stomach, uterus, or soft tissue sarcomas. Radiation is also used to treat leukemia and lymphoma.

4. Combination with Chemotherapy

[0314] Chemotherapy is the treatment of cancer with drugs that can destroy cancer cells. In current usage, the term “chemotherapy” usually refers to cytotoxic drugs which affect rapidly dividing cells in general, in contrast with targeted therapy. Chemotherapy drugs interfere with cell division in various possible ways, e.g. with the duplication of DNA or the separation of newly formed chromosomes. Most forms of chemotherapy target all rapidly dividing cells and are not specific to cancer cells, although some degree of specificity may come from the inability of many cancer cells to repair DNA damage, while normal cells generally can.

[0315] Most chemotherapy regimens are given in combination. Exemplary chemotherapeutic agents include, but are not limited to, 5-FU Enhancer, 9-AC, AG2037, AG3340, Aggrecanase Inhibitor, Aminoglutethimide, Amsacrine (m-AMSA), Asparaginase, Azacitidine, Batimastat (BB94), BAY 12-9566, BCH-4556, Bis-Naphtalimide, Busulfan, Capecitabine, Carboplatin, Carmustaine+Polifepr Osan, cdk4/cdk2 inhibitors, Chlorambucil, CI-994, Cisplatin, Cladribine, CS-682, Cytarabine HCl, D2163, Dactinomycin, Daunorubicin HCl, DepoCyt, Dexifosamide, Docetaxel, Dolastain, Doxifluridine, Doxorubicin, DX8951f, E 7070, EGFR, Epirubicin, Erythropoietin, Estramustine phosphate sodium, Etoposide (VP16-213), Farnesyl Transferase Inhibitor, FK 317, Flavopiridol, Floxuridine, Fludarabine, Fluorouracil (5-FU), Flutamide, Fragyline, Gemcitabine, Hexamethylmelamine (HMM), Hydroxyurea (hydroxycarbamide), Ifosfamide, Interferon Alfa-2a, Interferon Alfa-2b, Interleukin-2, Irinotecan, ISI 641, Krestin, Lemonal DP 2202, Leuprolide acetate (LHRH-releasing factor analogue), Levamisole, LiGLA (lithium-gamma linolenate), Lodine Seeds, Lometexol, Lomustine (CCNU), Marimistat, Mechlorethamine HCl (nitrogen mustard), Megestrol acetate, Meglamine GLA, Mercaptopurine, Mesna, Mitoguazone (methyl-GAG; methyl glyoxal bis-guanylhydrazone; MGBG), Mitotane (o.p′-DDD), Mitoxantrone, Mitoxantrone HCl, MMI 270, MMP, MTA/LY 231514, Octreotide, ODN 698, OK-432, Oral Platinum, Oral Taxoid, Paclitaxel (TAXOL®), PARP Inhibitors, PD 183805, Pentostatin (2′ deoxycoformycin), PKC 412, Plicamycin, Procarbazine HCl, PSC 833, Ralitrexed, RAS Farnesyl Transferase Inhibitor, RAS Oncogene Inhibitor, Semustine (methyl-CCNU), Streptozocin, Suramin, Tamoxifen citrate, Taxane Analog, Temozolomide, Teniposide (VM-26), Thioguanine, Thiotepa, Topotecan, Tyrosine Kinase, UFT (Tegafur/Uracil), Valrubicin, Vinblastine sulfate, Vindesine sulfate, VX-710, VX-853, YM 116, ZD 0101, ZD 0473/Anormed, ZD 1839, ZD 9331.

### 5. Immuno-Oncology and Cell Therapies

[0316] Recent progress in the field of cancer immunology has allowed the development of several approaches to help the immune system keep the cancer at bay. Such immunotherapy approaches include the targeting of cancer antigens through monoclonal antibodies or through adoptive transfer of ex vivo engineered T cells (e.g., which contain chimeric antigen receptors or engineered T cell receptors).

[0317] In some embodiments, pharmaceutical compositions, biocircuits, biocircuit components, effector modules including their SREs or payloads of the present disclosure may be used in the modulation or alteration or exploitation of the immune system to target one or more cancers. This approach may also be considered with other such biological approaches, e.g., immune response modifying therapies such as the administration of interferons, interleukins, colony-stimulating factors, other monoclonal antibodies, vaccines, gene therapy, and nonspecific immunomodulating agents are also envisioned as anti-cancer therapies to be combined with the pharmaceutical compositions, biocircuits, biocircuit components, effector modules including their SREs or payloads of the present disclosure.

[0318] Cancer immunotherapy refers to a diverse set of therapeutic strategies designed to induce the patient's own immune system to fight the cancer. In some embodiments, pharmaceutical compositions, biocircuits, biocircuit components, effector modules including their SREs or payloads of the present disclosure are designed as immune-oncology therapeutics.

[0319] Also provided herein are methods of increasing the survival in a subject with cancer. The methods may comprise introducing into the subject, any of the compositions described herein. The subject may be administered at least one stimulus described herein. In one embodiment the stimulus may be a ligand. In one embodiment, administration of the ligand may result in the modulation of the payload. Payloads such as but not limited to CARs when expressed in response to the ligand, may trigger an anti-cancer immune response. Such anti-cancer immune responses may result in reduction of tumor burden which in turn may increase the survival of the subject with cancer. Ligand may be administered prior to, during or after the introduction of the compositions into the subject. Survival may be measured and quantified using any of the methods known in the art. In some embodiment, survival may be quantified using Kaplan Meier analysis and/or the log rank test. In some embodiments, survival may be quantified using the survival ratio, which may be defined as the ratio of the median survival observed in a group to the median survival of the untransduced-vehicle treatment group. In some embodiments, the survival ratio is at least 1. In some embodiments, the survival ratio is at least 1.1, 1.2, 1.3, 1.4, 1.5, 1.6, 1.7 1.8, 1.9, 2, 3, 4, 5, 6, 7, 8, 9, or 10.

[0320] The present invention also provides methods of reducing tumor burden in a subject. In some embodiments. As used herein, “tumor burden” refers to the number of cancer cells, or the amount of cancer in a subject. In some aspects tumor burden also refers to tumor load. In some embodiments, the tumor may be disseminated throughout the body of the subject. In one aspect, the tumor may be a liquid tumor such as leukemia or a lymphoma. The methods of reducing tumor burden may involve administering to the subject, a therapeutically effective amount of the immune cells. Immune cells may be engineered to express the compositions described herein. In some embodiments, the immune cells expressing the compositions of the invention may be administered to the subject via any of the routes of delivery described herein. Also provided herein are dosing regimens for administering the immune cells. In some embodiments, the subject may also be administered a therapeutically effective amount of the stimulus to tune the expression of the immunotherapeutic agent. In some aspects, the immunotherapeutic agents may be capable of reducing the tumor burden. Regimens for ligand/stimulus dosing are also provided. Reduction in tumor burden may be measured by any of the methods known in the art including tumor imaging, and measurement of marker proteins. In some aspects, bioluminescent imaging may be used to measure tumor burden. Bioluminescence imaging utilizes native light emission from bioluminescent proteins such as luciferase. Such bioluminescent proteins can participate in chemical reactions that release photons by the addition of suitable substrates. The release of photons can be captured by sensitive detection methods and quantified. Tumor cells may be engineered to express luciferase and the efficacy of the compositions described herein to reduce tumor burden may quantified by imaging. In some aspects, the tumor burden may be measured by the flux of photons (photons per sec). In some embodiments, photon flux positively correlates with tumor burden.

[0321] Parameters for improving CAR-T therapy outcome are described in Finney et al. JCI. 2019; 129(5):2123-2132 (the contents of which are herein incorporated by reference in their entirety). The levels of biomarker LAG3 (high)/TNF-α (low) in peripheral blood CD8+ T cells at the time of apheresis may also predict a subsequent dysfunctional response in subjects with high antigen load who do not achieve complete response that is durable for more than a few weeks. T cell-intrinsic features that are a consequence of the starting T cell repertoire and the effects of the manufacturing process converge with CD19 antigen-induced activation following adoptive transfer may also play a role in the outcome of CAR-T therapy. The starting T cell repertoire may in part be affected by the timing of the apheresis. In one embodiment, the apheresis may be performed prior to chemotherapy. Cumulative burden of CD19 expressing leukemic and normal B cells, as evaluated in the bone marrow prior to lymphodepleting chemotherapy may be important for determining CAR-T therapy outcome. According to Finney et al., increase antigen burden improves CAR-T therapy outcome. To increase CD19 antigen burden in vivo, subjects may also be infused with expanded subject derived T cells genetically modified to express CD19 (also referred to as T-APCs).

### 6. Cell Therapies

[0322] There are several types of cellular immunotherapies, including tumor infiltrating lymphocyte (TIL) therapy, genetically engineered T cells bearing chimeric antigen receptors (CARs), and recombinant TCR technology.

[0323] According to the present disclosure, the biocircuits and systems may be used in the development and implementation of cell therapies such as adoptive cell therapy. The biocircuits, their components, effector modules and their SREs and payloads may be used in cell therapies to effect TCR removal-TCR gene disruption, TCR engineering, to regulate epitope tagged receptors, in APC platforms for stimulating T cells, as a tool to enhance ex vivo APC stimulation, to improve methods of T cell expansion, in ex vivo stimulation with antigen, in TCR/CAR combinations, in the manipulation or regulation of TILs, in allogeneic cell therapy, in combination T cell therapy with other treatment lines (e.g. radiation, cytokines), to encode engineered TCRs, or modified TCRs, or to enhance T cells other than TCRs (e.g. by introducing cytokine genes, genes for the checkpoint inhibitors PD1, CTLA4).

[0324] In some embodiments, improved response rates are obtained in support of cell therapies.

[0325] Expansion and persistence of cell populations may be achieved through regulation or fine tuning of the payloads, e.g., the receptors or pathway components in T cells, NK cells or other immune-related cells. In some embodiments, biocircuits, their components, SREs or effector modules are designed to spatially and/or temporally control the expression of proteins which enhance T-cell or NK cell response. In some embodiments, biocircuits, their components, SREs or effector modules are designed to spatially and/or temporally control the expression of proteins which inhibit T-cell or NK cell response.

[0326] In some embodiments, biocircuits, their components, SREs or effector modules are designed to reshape the tumor microenvironment in order to extend utility of the biocircuit or a pharmaceutical composition beyond direct cell killing.

[0327] In some embodiments, biocircuits, their components, SREs or effector modules are designed to reduce, mitigate or eliminate the CAR cytokine storm. In some embodiments such reduction, mitigation and/or elimination occurs in solid tumors or tumor microenvironments.

[0328] In some embodiments the effector modules may encode one or more cytokines. In some embodiments, the cytokine is IL15. Effector modules encoding IL15 may be designed to induce proliferation in cytotoxic populations and avoid stimulation of Tregs. In other cases, the effector modules which induce proliferation in cytotoxic populations may also stimulate NK and NKT cells.

[0329] In some embodiments, effector modules may encode, or be tuned or induced to produce, one or more cytokines for expansion of cells in the biocircuits of the disclosure. In such cases the cells may be tested for actual expansion. Expansion may be at least 5%, 10%, 20%, 30%, 40%, 50%, 60%, 70%, 80%, 90% or more.

[0330] In some embodiments, the tumor microenvironment may be remodeled using a biocircuit containing an effector module encoding IL17.

[0331] In some embodiments, biocircuits, their components, SREs or effector modules are designed to modulate Tregs to attenuate autoimmune disorders. In such a case, IL2 may be regulated using a singly tuned module or one having multiple tuned features as described herein.

[0332] In some embodiments, biocircuits, their components, SREs or effector modules are designed to be significantly less immunogenic than other biocircuits or switches in the art.

[0333] As used herein, “significantly less immunogenic” refers to a detectable decrease in immunogenicity. In another embodiment, the term refers to a fold decrease in immunogenicity. In another embodiment, the term refers to a decrease such that an effective amount of the biocircuits, their components, SREs or effector modules which can be administered without triggering a detectable immune response. In another embodiment, the term refers to a decrease such that the biocircuits, their components, SREs or effector modules can be repeatedly administered without eliciting an immune response. In another embodiment, the decrease is such that the biocircuits, their components, SREs or effector modules can be repeatedly administered without eliciting an immune response.

[0334] In another embodiment, the biocircuits, their components, SREs or effector modules is 2-fold less immunogenic than its unmodified counterpart or reference compound. In another embodiment, immunogenicity is reduced by a 3-fold factor. In another embodiment, immunogenicity is reduced by a 5-fold factor. In another embodiment, immunogenicity is reduced by a 7-fold factor. In another embodiment, immunogenicity is reduced by a 10-fold factor. In another embodiment, immunogenicity is reduced by a 15-fold factor. In another embodiment, immunogenicity is reduced by a fold factor. In another embodiment, immunogenicity is reduced by a 50-fold factor. In another embodiment, immunogenicity is reduced by a 100-fold factor. In another embodiment, immunogenicity is reduced by a 200-fold factor. In another embodiment, immunogenicity is reduced by a 500-fold factor. In another embodiment, immunogenicity is reduced by a 1000-fold factor. In another embodiment, immunogenicity is reduced by a 2000-fold factor. In another embodiment, immunogenicity is reduced by another fold difference.

[0335] Methods of determining immunogenicity are well known in the art, and include, e.g. measuring secretion of cytokines (e.g. IL12, IFN alpha, TNF-alpha, RANTES, MIP-1alpha or beta, IL6, IFN-beta, or IL8), measuring expression of DC activation markers (e.g. CD83, HLA-DR, CD80 and CD86), or measuring ability to act as an adjuvant for an adaptive immune response.

[0336] In one embodiment, the chimeric antigen receptor (CAR) of the present disclosure may be a conditionally active CAR. A wild type protein or domain thereof, such as those described herein may be used to generate a conditionally active biologic protein which are reversibly or irreversibly inactivated at the wild type normal physiological conditions as well as to such conditionally active biologic proteins and domains and uses of such conditional active biologic proteins and domains are provided. Such methods and conditionally active proteins are taught in, for example, International Publication No. WO2016033331, the contents of which are incorporated herein by reference in their entirety. As a non-limiting example, the CAR comprises at least one antigen specific targeting region evolved from a wild type protein or a domain thereof and one or more of a decrease in activity in the assay at the normal physiological condition compared to the antigen specific targeting region of the wild-type protein or a domain thereof, and an increase in activity in the assay under the aberrant condition compared to the antigen specific targeting region of the wild-type protein or a domain thereof.

### 7. Diseases and Toxins

[0337] Various infectious diseases may be treated with pharmaceutical compositions, biocircuits, biocircuit components, effector modules including their SREs or payloads of the present disclosure. As used herein, the term “infectious disease” refers to any disorders caused by organisms such as bacteria, viruses, fungi or parasites. As a non-limiting example, the infectious disease may be Acute bacterial rhinosinusitis, 14-day measles, Acne, Acrodermatitis chronica atrophicans (ACA)-(late skin manifestation of latent Lyme disease), Acute hemorrhagic conjunctivitis, Acute hemorrhagic cystitis, Acute rhinosinusitis, Adult T-cell Leukemia-Lymphoma (ATLL), African Sleeping Sickness, AIDS (Acquired Immunodeficiency Syndrome), Alveolar hydatid, Amebiasis, Amebic meningoencephalitis, Anaplasmosis, Anthrax, Arboviral or parainfectious, Ascariasis—(Roundworm infections), Aseptic meningitis, Athlete's foot (Tinea pedis), Australian tick typhus, Avian Influenza, Babesiosis, Bacillary angiomatosis, Bacterial meningitis, Bacterial vaginosis, Balanitis, Balantidiasis, Bang's disease, Barmah Forest virus infection, Bartonellosis (Verruga peruana; Carrion's disease; Oroya fever), Bat Lyssavirus Infection, Bay sore (Chiclero's ulcer), Baylisascaris infection (Racoon roundworm infection), Beaver fever, Beef tapeworm, Bejel (endemic syphilis), Biphasic meningoencephalitis, Black Bane, Black death, Black piedra, Blackwater Fever, Blastomycosis, Blennorrhea of the newborn, Blepharitis, Boils, Bornholm disease (pleurodynia), Borrelia miyamotoi Disease, Botulism, Boutonneuse fever, Brazilian purpuric fever, Break Bone fever, Brill, Bronchiolitis, Bronchitis, Brucellosis (Bang's disease), Bubonic plague, Bullous impetigo, Burkholderia mallei (Glanders), Burkholderia pseudomallei (Melioidosis), Buruli ulcers (also Mycoburuli ulcers), Busse, Busse-Buschke disease (Cryptococcosis), California group encephalitis, Campylobacteriosis, Candidiasis, Canfield fever (Canicola fever; 7-day fever; Weil's disease; leptospirosis; canefield fever), Canicola fever, Capillariasis, Carate, Carbapenem-resistant Enterobacteriaceae (CRE), Carbuncle, Carrion's disease, Cat Scratch fever, Cave disease, Central Asian hemorrhagic fever, Central European tick, Cervical cancer, Chagas disease, Chancroid (Soft chancre), Chicago disease, Chickenpox (Varicella), Chiclero's ulcer, Chikungunya fever, Chlamydial infection, Cholera, Chromoblastomycosis, Ciguatera, Clap, Clonorchiasis (Liver fluke infection), Clostridium difficile Infection, ClostriDium perfringens (Epsilon Toxin), Coccidioidomycosis fungal infection (Valley fever; desert rheumatism), Coenurosis, Colorado tick fever, Condyloma accuminata, Condyloma accuminata (Warts), Condyloma lata, Congo fever, Congo hemorrhagic fever virus, Conjunctivitis, cowpox, Crabs, Crimean, Croup, Cryptococcosis, Cryptosporidiosis (Crypto), Cutaneous Larval Migrans, Cyclosporiasis, Cystic hydatid, Cysticercosis, Cystitis, Czechoslovak tick, D68 (EV-D68), Dacryocytitis, Dandy fever, Darling's Disease, Deer fly fever, Dengue fever (1, 2, 3 and 4), Desert rheumatism, Devil's grip, Diphasic milk fever, Diphtheria, Disseminated Intravascular Coagulation, Dog tapeworm, Donovanosis, Donovanosis (Granuloma inguinale), Dracontiasis, Dracunculosis, Duke's disease, Dum Dum Disease, Durand-Nicholas-Favre disease, Dwarf tapeworm, E. Coli infection (E. coli), Eastern equine encephalitis, Ebola Hemorrhagic Fever (Ebola virus disease EVD), Ectothrix, Ehrlichiosis (Sennetsu fever), Encephalitis, Endemic Relapsing fever, Endemic syphilis, Endophthalmitis, Endothrix, Enterobiasis (Pinworm infection), Enterotoxin—B Poisoning (Staph Food Poisoning), Enterovirus Infection, Epidemic Keratoconjunctivitis, Epidemic Relapsing fever, Epidemic typhus, Epiglottitis, Erysipelis, Erysipeloid (Erysipelothricosis), Erythema chronicum migrans, Erythema infectiosum, Erythema marginatum, Erythema multiforme, Erythema nodosum, Erythema nodosum leprosum, Erythrasma, Espundia, Eumycotic mycetoma, European blastomycosis, Exanthem subitum (Sixth disease), Eyeworm, Far Eastern tick, Fascioliasis, Fievre boutonneuse (Tick typhus), Fifth Disease (erythema infectiosum), Filatow-Dukes' Disease (Scalded Skin Syndrome; Ritter's Disease), Fish tapeworm, Fitz-Hugh-Curtis syndrome—Perihepatitis, Flinders Island Spotted Fever, Flu (Influenza), Folliculitis, Four Corners Disease, Four Corners Disease (Human Pulmonary Syndrome (HPS)), Frambesia, Francis disease, Furunculosis, Gas gangrene, Gastroenteritis, Genital Herpes, Genital Warts, German measles, Gerstmann-Straussler-Scheinker (GSS), Giardiasis, Gilchrist's disease, Gingivitis, Gingivostomatitis, Glanders, Glandular fever (infectious mononucleosis), Gnathostomiasis, Gonococcal Infection (Gonorrhea), Gonorrhea, Granuloma inguinale (Donovanosis), Guinea Worm, Haemophilus Influenza disease, Hamburger disease, Hansen's disease—leprosy, Hantaan disease, Hantaan-Korean hemorrhagic fever, Hantavirus Pulmonary Syndrome, Hantavirus Pulmonary Syndrome (HPS), Hard chancre, Hard measles, Haverhill fever—Rat bite fever, Head and Body Lice, Heartland fever, Helicobacterosis, Hemolytic Uremic Syndrome (HUS), Hepatitis A, Hepatitis B, Hepatitis C, Hepatitis D, Hepatitis E, Herpangina, Herpes—genital, Herpes labialis, Herpes—neonatal, Hidradenitis, Histoplasmosis, Histoplasmosis infection (Histoplasmosis), His-Werner disease, HIV infection, Hookworm infections, Hordeola, Hordeola (Stye), HTLV, HTLV-associated myelopathy (HAM), Human granulocytic ehrlichiosis, Human monocytic ehrlichiosis, Human Papilloma virus (HPV), Human Pulmonary Syndrome, Hydatid cyst, Hydrophobia, Impetigo, Including congenital (German Measles), Inclusion conjunctivitis, Inclusion conjunctivitis—Swimming Pool conjunctivitis—Pannus, Infantile diarrhea, Infectious Mononucleosis, Infectious myocarditis, Infectious pericarditis, Influenza, Isosporiasis, Israeli spotted fever, Japanese Encephalitis, Jock itch, Jorge Lobo disease—lobomycosis, Jungle yellow fever, Junin Argentinian hemorrhagic fever, Kala Azar, Kaposi's sarcoma, Keloidal blastomycosis, Keratoconjunctivitis, Kuru, Kyasanur forest disease, LaCrosse encephalitis, Lassa hemorrhagic fever, Legionellosis (Legionnaires Disease), Legionnaire's pneumonia, Lemierre's Syndrome (Postanginal septicemia), Lemming fever, Leprosy, Leptospirosis (Nanukayami fever; Weil's disease), Listeriosis (Listeria), Liver fluke infection, Lobo's mycosis, Lockjaw, Loiasis, Louping Ill, Ludwig's angina, Lung fluke infection, Lung fluke infection (Paragonimiasis), Lyme disease, Lymphogranuloma venereum infection (LGV), Machupo Bolivian hemorrhagic fever, Madura foot, Mal del pinto, Malaria, Malignant pustule, Malta fever, Marburg hemorrhagic fever, Masters disease, Maternal Sepsis (Puerperal fever), Measles, Mediterranean spotted fever, Melioidosis (Whitmore's disease), Meningitis, Meningococcal Disease, MERS, Milker's nodule, Molluscum contagiosum, Moniliasis, monkeypox, Mononucleosis, Mononucleosis-like syndrome, Montezuma's Revenge, Morbilli, MRSA (methicillin-resistant Staphylococcus aureus) infection, Mucormycosis—Zygomycosis, Multiple Organ Dysfunction Syndrome or MODS, Multiple-system atrophy (MSA), Mumps, Murine typhus, Murray Valley Encephalitis (MVE), Mycoburuli ulcers, Mycoburuli ulcers—Buruli ulcers, Mycotic vulvovaginitis, Myositis, Nanukayami fever, Necrotizing fasciitis, Necrotizing fasciitis—Type 1, Necrotizing fasciitis-Type 2, Negishi, New world spotted fever, Nocardiosis, Nongonococcal urethritis, Non-Polio (Non-Polio Enterovirus), Norovirus infection, North American blastomycosis, North Asian tick typhus, Norwalk virus infection, Norwegian itch, O'Hara disease, Omsk hemorrhagic fever, Onchoceriasis, Onychomycosis, Opisthorchiasis, Opthalmia neonatorium, Oral hairy leukoplakia, Orf, Oriental Sore, Oriental Spotted Fever, Ornithosis (Parrot fever; Psittacosis), Oroya fever, Otitis externa, Otitis media, Pannus, Paracoccidioidomycosis, Paragonimiasis, Paralytic Shellfish Poisoning (Paralytic Shellfish Poisoning), Paronychia (Whitlow), Parotitis, PCP pneumonia, Pediculosis, Peliosis hepatica, Pelvic Inflammatory Disease, Pertussis (also called Whooping cough), Phaeohyphomycosis, Pharyngoconjunctival fever, Piedra (White Piedra), Piedra (Black Piedra), Pigbel, Pink eye conjunctivitis, Pinta, Pinworm infection, Pitted Keratolysis, Pityriasis versicolor (Tinea versicolor), Plague; Bubonic, Pleurodynia, Pneumococcal Disease, Pneumocystosis, Pneumonia, Pneumonic (Plague), Polio or Poliomyelitis, Polycystic hydatid, Pontiac fever, Pork tapeworm, Posada-Wernicke disease, Postanginal septicemia, Powassan, Progressive multifocal leukencephalopathy, Progressive Rubella Panencephalitis, Prostatitis, Pseudomembranous colitis, Psittacosis, Puerperal fever, Pustular Rash diseases (Small pox), Pyelonephritis, Pylephlebitis, Q-Fever, Quinsy, Quintana fever (5-day fever), Rabbit fever, Rabies, Racoon roundworm infection, Rat bite fever, Rat tapeworm, Reiter Syndrome, Relapsing fever, Respiratory syncytial virus (RSV) infection, Rheumatic fever, Rhodotorulosis, Ricin Poisoning, Rickettsialpox, Rickettsiosis, Rift Valley Fever, Ringworm, Ritter's Disease, River Blindness, Rocky Mountain spotted fever, Rose Handler's disease (Sporotrichosis), Rose rash of infants, Roseola, Ross River fever, Rotavirus infection, Roundworm infections, Rubella, Rubeola, Russian spring, Salmonellosis gastroenteritis, San Joaquin Valley fever, Sao Paulo Encephalitis, Sao Paulo fever, SARS, Scabies Infestation (Scabies) (Norwegian itch), Scalded Skin Syndrome, Scarlet fever (Scarlatina), Schistosomiasis, Scombroid, Scrub typhus, Sennetsu fever, Sepsis (Septic shock), Severe Acute Respiratory Syndrome, Severe Acute Respiratory Syndrome (SARS), Shiga Toxigenic Escherichia coli (STEC/VTEC), Shigellosis gastroenteritis (Shigella), Shinbone fever, Shingles, Shipping fever, Siberian tick typhus, Sinusitis, Sixth disease, Slapped cheek disease, Sleeping sickness, Smallpox (Variola), Snail Fever, Soft chancre, Southern tick associated rash illness, Sparganosis, Spelunker's disease, Sporadic typhus, Sporotrichosis, Spotted fever, Spring, St. Louis encephalitis, Staphylococcal Food Poisoning, Staphylococcal Infection, Strep. throat, Streptococcal Disease, Streptococcal Toxic-Shock Syndrome, Strongyloiciasis, Stye, Subacute Sclerosing Panencephalitis, Subacute Sclerosing Panencephalitis (SSPE), Sudden Acute Respiratory Syndrome, Sudden Rash, Swimmer's ear, Swimmer's Itch, Swimming Pool conjunctivitis, Sylvatic yellow fever, Syphilis, Systemic Inflammatory Response Syndrome (SIRS), Tabes dorsalis (tertiary syphilis), Taeniasis, Taiga encephalitis, Tanner's disease, Tapeworm infections, Temporal lobe encephalitis, Temporal lobe encephalitis, tetani (Lock Jaw), Tetanus Infection, Threadworm infections, Thrush, Tick, Tick typhus, Tinea barbae, Tinea capitis, Tinea corporis, Tinea cruris, Tinea manuum, Tinea nigra, Tinea pedis, Tinea unguium, Tinea versicolor, Torulopsosis, Torulosis, Toxic Shock Syndrome, Toxoplasmosis, transmissible spongioform (CJD), Traveler's diarrhea, Trench fever 5, Trichinellosis, Trichomoniasis, Trichomycosis axillaris, Trichuriasis, Tropical Spastic Paraparesis (TSP), Trypanosomiasis, Tuberculosis (TB), Tuberculosis, Tularemia, Typhoid Fever, Typhus fever, Ulcus molle, Undulant fever, Urban yellow fever, Urethritis, Vaginitis, Vaginosis, Vancomycin Intermediate (VISA), Vancomycin Resistant (VRSA), Varicella, Venezuelan Equine encephalitis, Verruga peruana, Vibrio cholerae (Cholera), Vibriosis (Vibrio), Vincent's disease or Trench mouth, Viral conjunctivitis, Viral Meningitis, Viral meningoencephalitis, Viral rash, Visceral Larval Migrans, Vomito negro, Vulvovaginitis, Warts, Waterhouse, Weil's disease, West Nile Fever, Western equine encephalitis, Whipple's disease, Whipworm infection, White Piedra, Whitlow, Whitmore's disease, Winter diarrhea, Wolhynia fever, Wool sorters' disease, Yaws, Yellow Fever, Yersinosis, Yersinosis (Yersinia), Zahorsky's disease, Zika virus disease, Zoster, Zygomycosis, John Cunningham Virus (JCV), Human immunodeficiency virus (HIV), Influenza virus, Hepatitis B, Hepatitis C, Hepatitis D, Respiratory syncytial virus (RSV), Herpes simplex virus 1 and 2, Human Cytomegalovirus, Epstein-Barr virus, Varicella zoster virus, Coronaviruses, Poxviruses, Enterovirus 71, Rubella virus, Human papilloma virus, Streptococcus pneumoniae, Streptococcus viridans., Staphylococcus aureus (S. aureus), Methicillin-resistant Staphylococcus aureus (MRSA), Vancomycin-intermediate Staphylococcus aureus (VISA), Vancomycin-resistant Staphylococcus aureus (VRSA), Staphylococcus epidermidis (S. epidermidis), Clostridium tetani, Bordetella pertussis, Bordetella paratussis, Mycobacterium, Francisella Tularensis, Toxoplasma gondii, Candida (C. albicans, C. glabrata, C. parapsilosis, C. tropicalis, C. krusei and C. lusitaniae) and/or any other infectious diseases, disorders or syndromes.

[0338] Various toxins may be treated with pharmaceutical compositions, biocircuits, biocircuit components, effector modules including their SREs or payloads of the present disclosure. Non-limited examples of toxins include Ricin, Bacillus anthracis, Shiga toxin and Shiga-like toxin, Botulinum toxins.

[0339] Various tropical diseases may be treated with pharmaceutical compositions, biocircuits, biocircuit components, effector modules including their SREs or payloads of the present disclosure. Non-limited examples of tropical diseases include Chikungunya fever, Dengue fever, Chagas disease, Rabies, Malaria, Ebola virus, Marburg virus, West Nile Virus, Yellow Fever, Japanese encephalitis virus, St. Louis encephalitis virus.

[0340] Various foodborne illnesses and gastroenteritis may be treated with pharmaceutical compositions, biocircuits, biocircuit components, effector modules including their SREs or payloads of the present disclosure. Non-limited examples of foodborne illnesses and gastroenteritis include Rotavirus, Norwalk virus (Norovirus), Campylobacter jejuni, Clostridium difficile, Entamoeba histolytica, Helicobacter pylori, Enterotoxin B of Staphylococcus aureus, Hepatitis A virus (HAV), Hepatitis E, Listeria monocytogenes, Salmonella, Clostridium perfringens, and Salmonella.

[0341] Various infectious agents may be treated with pharmaceutical compositions, biocircuits, biocircuit components, effector modules including their SREs or payloads of the present disclosure. Non-limited examples of infectious agents include adenoviruses, Anaplasma phagocytophilium, Ascaris lumbricoides, Bacillus anthracis, Bacillus cereus, Bacteroides sp, Barmah Forest virus, Bartonella bacilliformis, Bartonella henselae, Bartonella quintana, beta-toxin of Clostridium perfringens, Bordetella pertussis, Bordetella parapertussis, Borrelia burgdorferi, Borrelia miyamotoi, Borrelia recurrentis, Borrelia sp., Botulinum toxin, Brucella sp., Burkholderia pseudomallei, California encephalitis virus, Campylobacter, Candida albicans, chikungunya virus, Chlamydia psittaci, Chlamydia trachomatis, Clonorchis sinensis, Clostridium difficile bacteria, Clostridium tetani, Colorado tick fever virus, Corynebacterium diphtheriae, Corynebacterium minutissimum, Coxiella burnetii, coxsackie A, coxsackie B, Crimean-Congo hemorrhagic fever virus, cytomegalovirus, dengue virus, Eastern Equine encephalitis virus, Ebola viruses, echovirus, Ehrlichia chaffeensis., Ehrlichia equi., Ehrlichia sp., Entamoeba histolytica, Enterobacter sp., Enterococcus faecalis, Enterovirus 71, Epstein-Barr virus (EBV), Erysipelothrix rhusiopathiae, Escherichia coli, Flavivirus, Fusobacterium necrophorum, Gardnerella vaginalis, Group B streptococcus, Haemophilus aegyptius, Haemophilus ducreyi, Haemophilus influenzae, hantavirus, Helicobacter pylori, Hepatitis A, Hepatitis B, Hepatitis C, Hepatitis D, Hepatitis E, herpes simplex virus 1 and 2, human herpes virus 6, human herpes Virus 8, human immunodeficiency virus 1 and 2, human T-cell leukemia viruses I and II, influenza viruses (A, B, C), Jamestown Canyon virus, Japanese encephalitis antigenic, Japanese encephalitis virus, John Cunningham virus, juninvirus, Kaposi's Sarcoma-associated Herpes Virus (KSHV), Klebsiella granulomatis, Klebsiella sp., Kyasanur Forest Disease virus, La Crosse virus, Lassavirus, Legionella pneumophila, Leptospira interrogans, Listeria monocytogenes, lymphocytic choriomeningitis virus, lyssavirus, Machupovirus, Marburg virus, measles virus, MERS coronavirus (MERS-CoV), Micrococcus sedentarius, Mobiluncus sp., Molluscipoxvirus, Moraxella catarrhalis, Morbilli-Rubeola virus, Mumpsvirus, Mycobacterium leprae, Mycobacterium tuberculosis, Mycobacterium ulcerans, Mycoplasma genitalium, Mycoplasma sp, Nairovirus, Neisseria gonorrhoeae, Neisseria meningitidis, Nocardia, Norwalk virus, norovirus, Omsk hemorrhagic fever virus, papilloma virus, parainfluenza viruses 1-3, parapoxvirus, parvovirus B19, Peptostreptococccus sp., Plasmodium sp., polioviruses types I, II, and III, Proteus sp., Pseudomonas aeruginosa, Pseudomonas pseudomallei, Pseudomonas sp., rabies virus, respiratory syncytial virus, ricin toxin, Rickettsia australis, Rickettsia conori, Rickettsia honei, Rickettsia prowazekii, Ross River Virus, rotavirus, rubellavirus, Saint Louis encephalitis, Salmonella Typhi, Sarcoptes scabiei, SARS-associated coronavirus (SARS-CoV), Serratia sp., Shiga toxin and Shiga-like toxin, Shigella sp., Sin Nombre Virus, Snowshoe hare virus, Staphylococcus aureus, Staphylococcus epidermidis, Streptobacillus moniliformis, Streptococcus pneumoniae, Streptococcus agalactiae, Streptococcus agalactiae, Streptococcus group A-H, Streptococcus pneumoniae, Streptococcus pyogenes, Treponema pallidum subsp. Pallidum, Treponema pallidum var. carateum, Treponema pallidum var. endemicum, Tropheryma whippelii, Ureaplasma urealyticum, Varicella-Zoster virus, variola virus, Vibrio cholerae, West Nile virus, yellow fever virus, Yersinia enterocolitica, Yersinia pestis, and Zika virus.

[0342] Various rare diseases may be treated with pharmaceutical compositions, biocircuits, biocircuit components, effector modules including their SREs or payloads of the present disclosure. As used herein, the term “rare disease” refers to any disease that affects a small percentage of the population. As a non-limiting example, the rare disease may be Acrocephalosyndactylia, Acrodermatitis, Addison Disease, Adie Syndrome, Alagille Syndrome, Amylose, Amyotrophic Lateral Sclerosis, Angelman Syndrome, Angiolymphoid Hyperplasia with Eosinophilia, Arnold-Chiari Malformation, Arthritis, Juvenile Rheumatoid, Asperger Syndrome, Bardet-Biedl Syndrome, Barrett Esophagus, Beckwith-Wiedemann Syndrome, Behcet Syndrome, Bloom Syndrome, Bowen's Disease, Brachial Plexus Neuropathies, Brown-Sequard Syndrome, Budd-Chiari Syndrome, Burkitt Lymphoma, Carcinoma 256, Walker, Caroli Disease, Charcot-Marie-Tooth Disease, Chediak-Higashi Syndrome, Chiari-Frommel Syndrome, Chondrodysplasia Punctata, Colonic Pseudo-Obstruction, Colorectal Neoplasms, Hereditary Nonpolyposis, Craniofacial Dysostosis, Creutzfeldt-Jakob Syndrome, Crohn Disease, Cushing Syndrome, Cystic Fibrosis, Dandy-Walker Syndrome, De Lange Syndrome, Dementia, Vascular, Dermatitis Herpetiformis, DiGeorge Syndrome, Diffuse Cerebral Sclerosis of Schilder, Duane Retraction Syndrome, Dupuytren Contracture, Ebstein Anomaly, Eisenmenger Complex, Ellis-Van Creveld Syndrome, Encephalitis, Enchondromatosis, Epidermal Necrolysis, Toxic, Facial Hemiatrophy, Factor XII Deficiency, Fanconi Anemia, Felty's Syndrome, Fibrous Dysplasia, Polyostotic, Fox-Fordyce Disease, Friedreich Ataxia, Fusobacterium, Gardner Syndrome, Gaucher Disease, Gerstmann Syndrome, Giant Lymph Node Hyperplasia, Glycogen Storage Disease Type I, Glycogen Storage Disease Type II, Glycogen Storage Disease Type IV, Glycogen Storage Disease Type V, Glycogen Storage Disease Type VII, Goldenhar Syndrome, Guillain-Barre Syndrome, Hallermann's Syndrome, Hamartoma Syndrome, Multiple, Hartnup Disease, Hepatolenticular Degeneration, Hepatolenticular Degeneration, Hereditary Sensory and Motor Neuropathy, Hirschsprung Disease, Histiocytic Necrotizing Lymphadenitis, Histiocytosis, Langerhans-Cell, Hodgkin Disease, Horner Syndrome, Huntington Disease, Hyperaldosteronism, Hyperhidrosis, Hyperostosis, Diffuse Idiopathic Skeletal, Hypopituitarism, Inappropriate ADH Syndrome, Intestinal Polyps, Isaacs Syndrome, Kartagener Syndrome, Kearns-Sayre Syndrome, Klippel-Feil Syndrome, Klippel-Trenaunay-Weber Syndrome, Kluver-Bucy Syndrome, Korsakoff Syndrome, Lafora Disease, Lambert-Eaton Myasthenic Syndrome, Landau-Kleffner Syndrome, Langer-Giedion Syndrome, Leigh Disease, Lesch-Nyhan Syndrome, Leukodystrophy, Globoid Cell, Li-Fraumeni Syndrome, Long QT Syndrome, Machado-Joseph Disease, Mallory-Weiss Syndrome, Marek Disease, Marfan Syndrome, Meckel Diverticulum, Meige Syndrome, Melkersson-Rosenthal Syndrome, Meniere Disease, Mikulicz' Disease, Miller Fisher Syndrome, Mobius Syndrome, Moyamoya Disease, Mucocutaneous Lymph Node Syndrome, Mucopolysaccharidosis I, Mucopolysaccharidosis II, Mucopolysaccharidosis III, Mucopolysaccharidosis IV, Mucopolysaccharidosis VI, Multiple Endocrine Neoplasia Type 1, Munchausen Syndrome by Proxy, Muscular Atrophy, Spinal, Narcolepsy, Neuroaxonal Dystrophies, Neuromyelitis Optica, Neuronal Ceroid-Lipofuscinoses, Niemann-Pick Diseases, Noonan Syndrome, Optic Atrophies, Hereditary, Osteitis Deformans, Osteochondritis, Osteochondrodysplasias, Osteolysis, Essential, Paget Disease Extramammary, Paget's Disease, Mammary, Panniculitis, Nodular Nonsuppurative, Papillon-Lefevre Disease, Paralysis, Pelizaeus-Merzbacher Disease, Pemphigus, Benign Familial, Penile Induration, Pericarditis, Constrictive, Peroxisomal Disorders, Peutz-Jeghers Syndrome, Pick Disease of the Brain, Pierre Robin Syndrome, Pigmentation Disorders, Pityriasis Lichenoides, Polycystic Ovary Syndrome, Polyendocrinopathies, Autoimmune, Prader-Willi Syndrome, Pupil Disorders, Rett Syndrome, Reye Syndrome, Rubinstein-Taybi Syndrome, Sandhoff Disease, Sarcoma, Ewing's, Schnitzler Syndrome, Sjogren's Syndrome, Sjogren-Larsson Syndrome, Smith-Lemli-Opitz Syndrome, Spinal Muscular Atrophies of Childhood, Sturge-Weber Syndrome, Sweating, Gustatory, Takayasu Arteritis, Tangier Disease, Tay-Sachs Disease, Thromboangiitis Obliterans, Thyroiditis, Autoimmune, Tietze's Syndrome, Togaviridae Infections, Tolosa-Hunt Syndrome, Tourette Syndrome, Uveomeningoencephalitic Syndrome, Waardenburg's Syndrome, Wegener Granulomatosis, Weil Disease, Werner Syndrome, Williams Syndrome, Wilms Tumor, Wolff-Parkinson-White Syndrome, Wolfram Syndrome, Wolman Disease, Zellweger Syndrome, Zollinger-Ellison Syndrome, and von Willebrand Diseases.

[0343] Various autoimmune diseases and autoimmune-related diseases may be treated with pharmaceutical compositions, biocircuits, biocircuit components, effector modules including their SREs or payloads of the present disclosure. As used herein, the term “autoimmune disease” refers to a disease in which the body produces antibodies that attack its own tissues. As a non-limiting example, the autoimmune disease may be Acute Disseminated Encephalomyelitis (ADEM), Acute necrotizing hemorrhagic leukoencephalitis, Addison's disease, Agammaglobulinemia, Alopecia areata, Amyloidosis, Ankylosing spondylitis, Anti-GBM/Anti-TBM nephritis, Antiphospholipid syndrome (APS), Autoimmune angioedema, Autoimmune aplastic anemia, Autoimmune dysautonomia, Autoimmune hepatitis, Autoimmune hyperlipidemia, Autoimmune immunodeficiency, Autoimmune inner ear disease (AIED), Autoimmune myocarditis, Autoimmune oophoritis, Autoimmune pancreatitis, Autoimmune retinopathy, Autoimmune thrombocytopenic purpura (ATP), Autoimmune thyroid disease, Autoimmune urticaria, Axonal & neuronal neuropathies, Balo disease, Behcet's disease, Bullous pemphigoid, Cardiomyopathy, Castleman disease, Celiac disease, Chagas disease, Chronic fatigue syndrome, Chronic inflammatory demyelinating polyneuropathy (CIDP), Chronic recurrent multifocal ostomyelitis (CRMO), Churg-Strauss syndrome, Cicatricial pemphigoid/benign mucosal pemphigoid, Crohn's disease, Cogans syndrome, Cold agglutinin disease, Congenital heart block, Coxsackie myocarditis, CREST disease, Essential mixed cryoglobulinemia, Demyelinating neuropathies, Dermatitis herpetiformis, Dermatomyositis, Devic's disease (neuromyelitis optica), Discoid lupus, Dressler's syndrome, Endometriosis, Eosinophilic esophagitis, Eosinophilic fasciitis, Erythema nodosum, Experimental allergic encephalomyelitis, Evans syndrome, Fibromyalgia, Fibrosing alveolitis, Giant cell arteritis (temporal arteritis), Giant cell myocarditis, Glomerulonephritis, Goodpasture's syndrome, Granulomatosis with Polyangiitis (GPA) (formerly called Wegener's Granulomatosis), Graves' disease, Guillain-Barre syndrome, Hashimoto's encephalitis, Hashimoto's thyroiditis, Hemolytic anemia, Henoch-Schonlein purpura, Herpes gestationis, Hypogammaglobulinemia, Idiopathic thrombocytopenic purpura (ITP), IgA nephropathy, IgG4-related sclerosing disease, Immunoregulatory lipoproteins, Inclusion body myositis, Interstitial cystitis, Juvenile arthritis, Juvenile diabetes (Type 1 diabetes), Juvenile myositis, Kawasaki syndrome, Lambert-Eaton syndrome, Leukocytoclastic vasculitis, Lichen planus, Lichen sclerosis, Ligneous conjunctivitis, Linear IgA disease (LAD), Lupus (SLE), Lyme disease, chronic, Meniere's disease, Microscopic polyangiitis, Mixed connective tissue disease (MCTD), Mooren's ulcer, Mucha-Habermann disease, Multiple sclerosis, Myasthenia gravis, Myositis, Narcolepsy, Neuromyelitis optica (Devic's), Neutropenia, Ocular cicatricial pemphigoid, Optic neuritis, Palindromic rheumatism, PANDAS (Pediatric Autoimmune Neuropsychiatric Disorders Associated with Streptococcus), Paraneoplastic cerebellar degeneration, Paroxysmal nocturnal hemoglobinuria (PNH), Parry Romberg syndrome, Parsonnage-Turner syndrome, Pars planitis (peripheral uveitis), Pemphigus, Peripheral neuropathy, Perivenous encephalomyelitis, Pernicious anemia, POEMS syndrome, Polyarteritis nodosa, Type I, II, & III autoimmune polyglandular syndromes, Polymyalgia rheumatica, Polymyositis, Postmyocardial infarction syndrome, Postpericardiotomy syndrome, Progesterone dermatitis, Primary biliary cirrhosis, Primary sclerosing cholangitis, Psoriasis, Psoriatic arthritis, Idiopathic pulmonary fibrosis, Pyoderma gangrenosum, Pure red cell aplasia, Raynauds phenomenon, Reactive Arthritis, Reflex sympathetic dystrophy, Reiter's syndrome, Relapsing polychondritis, Restless legs syndrome, Retroperitoneal fibrosis, Rheumatic fever, Rheumatoid arthritis, Sarcoidosis, Schmidt syndrome, Scleritis, Scleroderma, Sjogren's syndrome, Sperm & testicular autoimmunity, Stiff person syndrome, Subacute bacterial endocarditis (SBE), Susac's syndrome, Sympathetic ophthalmia, Takayasu's arteritis, Temporal arteritis/Giant cell arteritis, Thrombocytopenic purpura (TTP), Tolosa-Hunt syndrome, Transverse myelitis, Ulcerative colitis, Undifferentiated connective tissue disease (UCTD), Uveitis, Vasculitis, Vesiculobullous dermatosis, Vitiligo, and Wegener's granulomatosis (now termed Granulomatosis with Polyangiitis (GPA).

[0344] Various kidney diseases may be treated with pharmaceutical compositions, biocircuits, biocircuit components, effector modules including their SREs or payloads of the present disclosure. As a non-limiting example, the kidney disease Abderhalden-Kaufmann-Lignac syndrome (Nephropathic Cystinosis), Abdominal Compartment Syndrome, Acute Kidney Failure/Acute Kidney Injury, Acute Lobar Nephronia, Acute Phosphate Nephropathy, Acute Tubular Necrosis, Adenine Phosphoribosyltransferase Deficiency, Adenovirus Nephritis, Alport Syndrome, Amyloidosis, ANCA Vasculitis Related to Endocarditis and Other Infections, Angiomyolipoma, Analgesic Nephropathy, Anorexia Nervosa and Kidney Disease, Angiotensin Antibodies and Focal Segmental Glomerulosclerosis, Antiphospholipid Syndrome, Anti-TNF-α Therapy-related Glomerulonephritis, APOL1 Mutations, Apparent Mineralocorticoid Excess Syndrome, Aristolochic Acid Nephropathy, Chinese Herbal Nephropathy, Balkan Endemic Nephropathy, Bartter Syndrome, Beeturia, β-Thalassemia Renal Disease, Bile Cast Nephropathy, BK Polyoma Virus Nephropathy in the Native Kidney, Bladder Rupture, Bladder Sphincter Dyssynergia, Bladder Tamponade, Border-Crossers' Nephropathy, Bourbon Virus and Acute Kidney Injury, Burnt Sugarcane Harvesting and Acute Renal Dysfunction, Byetta and Renal Failure, Clq Nephropathy, Cannabinoid Hyperemesis Acute Renal Failure, Cardiorenal syndrome, Carfilzomib-Indiced Renal Injury, CFHR5 nephropathy, Charcot-Marie-Tooth Disease with Glomerulopathy, Cherry Concentrate and Acute Kidney Injury, Cholesterol Emboli, Churg-Strauss syndrome, Chyluria, Colistin Nephrotoxicity, Collagenofibrotic Glomerulopathy, Collapsing Glomerulopathy, Collapsing Glomerulopathy Related to CMV, Congenital Nephrotic Syndrome, Conorenal syndrome (Mainzer-Saldino Syndrome or Saldino-Mainzer Disease), Contrast Nephropathy, Copper Sulpfate Intoxication, Cortical Necrosis, Crizotinib-related Acute Kidney Injury, Cryoglobuinemia, Crystalglobulin-Induced Nephropathy, Crystal-Induced Acute Kidney injury, Cystic Kidney Disease, Acquired, Cystinuria, Dasatinib-Induced Nephrotic-Range Proteinuria, Dense Deposit Disease (MPGN Type 2), Dent Disease (X-linked Recessive Nephrolithiasis), Dialysis Disequilibrium Syndrome, Diabetes and Diabetic Kidney Disease, Diabetes Insipidus, Dietary Supplements and Renal Failure, Drugs of Abuse and Kidney Disease, Duplicated Ureter, EAST syndrome, Ebola and the Kidney, Ectopic Kidney, Ectopic Ureter, Edema, Swelling, Erdheim-Chester Disease, Fabry's Disease, Familial Hypocalciuric Hypercalcemia, Fanconi Syndrome, Fraser syndrome, Fibronectin Glomerulopathy, Fibrillary Glomerulonephritis and Immunotactoid Glomerulopathy, Fraley syndrome, Focal Segmental Glomerulosclerosis, Focal Sclerosis, Focal Glomerulosclerosis, Galloway Mowat syndrome, Giant Cell (Temporal) Arteritis with Kidney Involvement, Gestational Hypertension, Gitelman Syndrome, Glomerular Diseases, Glomerular Tubular Reflux, Glycosuria, Goodpasture Syndrome, Hair Dye Ingestion and Acute Kidney Injury, Hantavirus Infection Podocytopathy, Hematuria (Blood in Urine), Hemolytic Uremic Syndrome (HUS), Atypical Hemolytic Uremic Syndrome (aHUS), Hemophagocytic Syndrome, Hemorrhagic Cystitis, Hemorrhagic Fever with Renal Syndrome (HFRS, Hantavirus Renal Disease, Korean Hemorrhagic Fever, Epidemic Hemorrhagic Fever, Nephropathis Epidemica), Hemosiderosis related to Paroxysmal Nocturnal Hemoglobinuria and Hemolytic Anemia, Hepatic Glomerulopathy, Hepatic Veno-Occlusive Disease, Sinusoidal Obstruction Syndrome, Hepatitis C-Associated Renal Disease, Hepatorenal Syndrome, Herbal Supplements and Kidney Disease, High Blood Pressure and Kidney Disease, HIV-Associated Nephropathy (HIVAN), Horseshoe Kidney (Renal Fusion), Hunner's Ulcer, Hyperaldosteronism, Hypercalcemia, Hyperkalemia, Hypermagnesemia, Hypernatremia, Hyperoxaluria, Hyperphosphatemia, Hypocalcemia, Hypokalemia, Hypokalemia-induced renal dysfunction, Hypokalemic Periodic Paralysis, Hypomagnesemia, Hyponatremia, Hypophosphatemia, IgA Nephropathy, IgG4 Nephropathy, Interstitial Cystitis, Painful Bladder Syndrome (Questionnaire), Interstitial Nephritis, Ivemark's syndrome, Ketamine-Associated Bladder Dysfunction, Kidney Stones, Nephrolithiasis, Kombucha Tea Toxicity, Lead Nephropathy and Lead-Related Nephrotoxicity, Leptospirosis Renal Disease, Light Chain Deposition Disease, Monoclonal Immunoglobulin Deposition Disease, Liddle Syndrome, Lightwood-Albright Syndrome, Lipoprotein Glomerulopathy, Lithium Nephrotoxicity, LMX1B Mutations Cause Hereditary FSGS, Loin Pain Hematuria, Lupus, Systemic Lupus Erythematosis, Lupus Kidney Disease, Lupus Nephritis, Lupus Nephritis with Antineutrophil Cytoplasmic Antibody Seropositivity, Lyme Disease-Associated Glomerulonephritis, Malarial Nephropathy, Malignancy-Associated Renal Disease, Malignant Hypertension, Malakoplakia, Meatal Stenosis, Medullary Cystic Kidney Disease, Medullary Sponge Kidney, Megaureter, Melamine Toxicity and the Kidney, Membranoproliferative Glomerulonephritis, Membranous Nephropathy, MesoAmerican Nephropathy, Metabolic Acidosis, Metabolic Alkalosis, Methotrexate-related Renal Failure, Microscopic Polyangiitis, Milk-alkalai syndrome, Minimal Change Disease, MDMA (Molly; Ecstacy; 3,4-Methylenedioxymethamphetamine) and Kidney Failure, Multicystic dysplastic kidney, Multiple Myeloma, Myeloproliferative Neoplasms and Glomerulopathy, Nail-patella Syndrome, Nephrocalcinosis, Nephrogenic Systemic Fibrosis, Nephroptosis (Floating Kidney, Renal Ptosis), Nephrotic Syndrome, Neurogenic Bladder, Nodular Glomerulosclerosis, Non-Gonococcal Urethritis, Nutcracker syndrome, Orofaciodigital Syndrome, Orotic Aciduria, Orthostatic Hypotension, Orthostatic Proteinuria, Osmotic Diuresis, Ovarian Hyperstimulation Syndrome, Page Kidney, Papillary Necrosis, Papillorenal Syndrome (Renal-Coloboma Syndrome, Isolated Renal Hypoplasia), Parvovirus B19 and the Kidney, The Peritoneal-Renal Syndrome, Posterior Urethral Valve, Post-infectious Glomerulonephritis, Post-streptococcal Glomerulonephritis, Polyarteritis Nodosa, Polycystic Kidney Disease, Posterior Urethral Valves, Preeclampsia, Propofol infusion syndrome, Proliferative Glomerulonephritis with Monoclonal IgG Deposits (Nasr Disease), Propolis (Honeybee Resin) Related Renal Failure, Proteinuria (Protein in Urine), Pseudohyperaldosteronism, Pseudohypobicarbonatemia, Pseudohypoparathyroidism, Pulmonary-Renal Syndrome, Pyelonephritis (Kidney Infection), Pyonephrosis, Radiation Nephropathy, Ranolazine and the Kidney, Refeeding syndrome, Reflux Nephropathy, Rapidly Progressive Glomerulonephritis, Renal Abscess, Peripnephric Abscess, Renal Agenesis, Renal Arcuate Vein Microthrombi-Associated Acute Kidney Injury, Renal Artery Aneurysm, Renal Artery Stenosis, Renal Cell Cancer, Renal Cyst, Renal Hypouricemia with Exercise-induced Acute Renal Failure, Renal Infarction, Renal Osteodystrophy, Renal Tubular Acidosis, Renin Secreting Tumors (Juxtaglomerular Cell Tumor), Reset Osmostat, Retrocaval Ureter, Retroperitoneal Fibrosis, Rhabdomyolysis, Rhabdomyolysis related to Bariatric surgery, Rheumatoid Arthritis-Associated Renal Disease, Sarcoidosis Renal Disease, Salt Wasting, Renal and Cerebral, Schistosomiasis and Glomerular Disease, Schimke immuno-osseous dysplasia, Scleroderma Renal Crisis, Serpentine Fibula-Polycystic Kidney Syndrome, Exner Syndrome, Sickle Cell Nephropathy, Silica Exposure and Chronic Kidney Disease, Sri Lankan Farmers' Kidney Disease, Sjogren's Syndrome and Renal Disease, Synthetic Cannabinoid Use and Acute Kidney Injury, Kidney Disease Following Hematopoietic Cell Transplantation, Kidney Disease Related to Stem Cell Transplantation, Thin Basement Membrane Disease, Benign Familial Hematuria, Trigonitis, Tuberculosis, Genitourinary, Tuberous Sclerosis, Tubular Dysgenesis, Immune Complex Tubulointerstitial Nephritis Due to Autoantibodies to the Proximal Tubule Brush Border, Tumor Lysis Syndrome, Uremia, Uremic Optic Neuropathy, Ureteritis Cystica, Ureterocele, Urethral Caruncle, Urethral Stricture, Urinary Incontinence, Urinary Tract Infection, Urinary Tract Obstruction, Vesicointestinal Fistula, Vesicoureteral Reflux, Volatile Anesthetics and Acute Kidney Injury, Von Hippel-Lindau Disease, Waldenstrom's Macroglobulinemic Glomerulonephritis, Warfarin-Related Nephropathy, Wasp Stings and Acute Kidney Injury, Wegener's Granulomatosis, Granulomatosis with Polyangiitis, West Nile Virus and Chronic Kidney Disease, and Wunderlich syndrome.

[0345] Various cardiovascular diseases may be treated with pharmaceutical compositions, biocircuits, biocircuit components, effector modules including their SREs or payloads of the present disclosure. As a non-limiting example, the cardiovascular disease may be Ischemic heart disease also known as coronary artery disease, Cerebrovascular disease (Stroke), Peripheral vascular disease, Heart failure, Rheumatic heart disease, and Congenital heart disease.

[0346] Various antibody deficiencies may be treated with pharmaceutical compositions, biocircuits, biocircuit components, effector modules including their SREs or payloads of the present disclosure. As a non-limiting example, the antibody deficiencies may be X-Linked Agammaglobulinemia (XLA), Autosomal Recessive Agammaglobulinemia (ARA), Common Variable Immune Deficiency (CVID), IgG (IgG1, IgG2, IgG3 and IgG4) Subclass Deficiency, Selective IgA Deficiency, Specific Antibody Deficiency (SAD), Transient Hypogammaglobulinemia of Infancy, Antibody Deficiency with Normal or Elevated Immunoglobulins, Selective IgM Deficiency, Immunodeficiency with Thymoma (Good's Syndrome), Transcobalamin II Deficiency, Warts, Hypogammaglobulinemia, Infection, Myelokathexis (WHIM) Syndrome, Drug-Induced Antibody Deficiency, Kappa Chain Deficiency, Heavy Chain Deficiencies, Post-Meiotic Segregation (PMS2) Disorder, and Unspecified Hypogammaglobulinemia.

[0347] Various ocular diseases may be treated with pharmaceutical compositions, biocircuits, biocircuit components, effector modules including their SREs or payloads of the present disclosure. As a non-limiting example, the ocular disease may be thyroid eye disease (TED), Graves' disease (GD) and orbitopathy, Retina Degeneration, Cataract, optic atrophy, macular degeneration, Leber congenital amaurosis, retinal degeneration, cone-rod dystrophy, Usher syndrome, leopard syndrome, photophobia, and photoaversion.

[0348] Various neurological diseases may be treated with pharmaceutical compositions, biocircuits, biocircuit components, effector modules including their SREs or payloads of the present disclosure. As a non-limiting example, the neurological disease may be Absence of the Septum Pellucidum, Acid Lipase Disease, Acid Maltase Deficiency, Acquired Epileptiform Aphasia, Acute Disseminated Encephalomyelitis, Attention Deficit-Hyperactivity Disorder (ADHD), Adie's Pupil, Adie's Syndrome, Adrenoleukodystrophy, Agenesis of the Corpus Callosum, Agnosia, Aicardi Syndrome, Aicardi-Goutieres Syndrome Disorder, AIDS—Neurological Complications, Alexander Disease, Alpers' Disease, Alternating Hemiplegia, Alzheimer's Disease, Amyotrophic Lateral Sclerosis (ALS), Anencephaly, Aneurysm, Angelman Syndrome, Angiomatosis, Anoxia, Antiphospholipid Syndrome, Aphasia, Apraxia, Arachnoid Cysts, Arachnoiditis, Arnold-Chiari Malformation, Arteriovenous Malformation, Asperger Syndrome, Ataxia, Ataxia Telangiectasia, Ataxias and Cerebellar or Spinocerebellar Degeneration, Atrial Fibrillation and Stroke, Attention Deficit-Hyperactivity Disorder, Autism Spectrum Disorder, Autonomic Dysfunction, Back Pain, Barth Syndrome, Batten Disease, Becker's Myotonia, Behcet's Disease, Bell's Palsy, Benign Essential Blepharospasm, Benign Focal Amyotrophy, Benign Intracranial Hypertension, Bernhardt-Roth Syndrome, Binswanger's Disease, Blepharospasm, Bloch-Sulzberger Syndrome, Brachial Plexus Birth Injuries, Brachial Plexus Injuries, Bradbury-Eggleston Syndrome, Brain and Spinal Tumors, Brain Aneurysm, Brain Injury, Brown-Sequard Syndrome, Bulbospinal Muscular Atrophy, Cerebral Autosomal Dominant Arteriopathy with Sub-cortical Infarcts and Leukoencephalopathy (CADASIL), Canavan Disease, Carpal Tunnel Syndrome, Causalgia, Cavernomas, Cavernous Angioma, Cavernous Malformation, Central Cervical Cord Syndrome, Central Cord Syndrome, Central Pain Syndrome, Central Pontine Myelinolysis, Cephalic Disorders, Ceramidase Deficiency, Cerebellar Degeneration, Cerebellar Hypoplasia, Cerebral Aneurysms, Cerebral Arteriosclerosis, Cerebral Atrophy, Cerebral Beriberi, Cerebral Cavernous Malformation, Cerebral Gigantism, Cerebral Hypoxia, Cerebral Palsy, Cerebro-Oculo-Facio-Skeletal Syndrome (COFS), Charcot-Marie-Tooth Disease, Chiari Malformation, Cholesterol Ester Storage Disease, Chorea, Choreoacanthocytosis, Chronic Inflammatory Demyelinating Polyneuropathy (CIDP), Chronic Orthostatic Intolerance, Chronic Pain, Cockayne Syndrome Type II, Coffin Lowry Syndrome, Colpocephaly, Coma, Complex Regional Pain Syndrome, Congenital Facial Diplegia, Congenital Myasthenia, Congenital Myopathy, Congenital Vascular Cavernous Malformations, Corticobasal Degeneration, Cranial Arteritis, Craniosynostosis, Cree encephalitis, Creutzfeldt-Jakob Disease, Cumulative Trauma Disorders, Cushing's Syndrome, Cytomegalic Inclusion Body Disease, Cytomegalovirus Infection, Dancing Eyes-Dancing Feet Syndrome, Dandy-Walker Syndrome, Dawson Disease, De Morsier's Syndrome, Dejerine-Klumpke Palsy, Dementia, Dementia—Multi-Infarct, Dementia—Semantic, Dementia—Subcortical, Dementia With Lewy Bodies, Dentate Cerebellar Ataxia, Dentatorubral Atrophy, Dermatomyositis, Developmental Dyspraxia, Devic's Syndrome, Diabetic Neuropathy, Diffuse Sclerosis, Dravet Syndrome, Dysautonomia, Dysgraphia, Dyslexia, Dysphagia, Dyspraxia, Dyssynergia Cerebellaris Myoclonica, Dyssynergia Cerebellaris Progressiva, Dystonias, Early Infantile Epileptic Encephalopathy, Empty Sella Syndrome, Encephalitis, Encephalitis Lethargica, Encephaloceles, Encephalopathy, Encephalopathy (familial infantile), Encephalotrigeminal Angiomatosis, Epilepsy, Epileptic Hemiplegia, Erb's Palsy, Erb-Duchenne and Dejerine-Klumpke Palsies, Essential Tremor, Extrapontine Myelinolysis, Fabry Disease, Fahr's Syndrome, Fainting, Familial Dysautonomia, Familial Hemangioma, Familial Idiopathic Basal Ganglia Calcification, Familial Periodic Paralyses, Familial Spastic Paralysis, Farber's Disease, Febrile Seizures, Fibromuscular Dysplasia, Fisher Syndrome, Floppy Infant Syndrome, Foot Drop, Friedreich's Ataxia, Frontotemporal Dementia, Gaucher Disease, Generalized Gangliosidoses, Gerstmann's Syndrome, Gerstmann-Straussler-Scheinker Disease, Giant Axonal Neuropathy, Giant Cell Arteritis, Giant Cell Inclusion Disease, Globoid Cell Leukodystrophy, Glossopharyngeal Neuralgia, Glycogen Storage Disease, Guillain-Barré Syndrome, Hallervorden-Spatz Disease, Head Injury, Headache, Hemicrania Continua, Hemifacial Spasm, Hemiplegia Alterans, Hereditary Neuropathies, Hereditary Spastic Paraplegia, Heredopathia Atactica Polyneuritiformis, Herpes Zoster, Herpes Zoster Oticus, Hirayama Syndrome, Holmes-Adie syndrome, Holoprosencephaly, HTLV-1 Associated Myelopathy, Hughes Syndrome, Huntington's Disease, Hydranencephaly, Hydrocephalus, Hydrocephalus—Normal Pressure, Hydromyelia, Hypercortisolism, Hypersomnia, Hypertonia, Hypotonia, Hypoxia, Immune-Mediated Encephalomyelitis, Inclusion Body Myositis, Incontinentia Pigmenti, Infantile Hypotonia, Infantile Neuroaxonal Dystrophy, Infantile Phytanic Acid Storage Disease, Infantile Refsum Disease, Infantile Spasms, Inflammatory Myopathies, Iniencephaly, Intestinal Lipodystrophy, Intracranial Cysts, Intracranial Hypertension, Isaacs' Syndrome, Joubert Syndrome, Kearns-Sayre Syndrome, Kennedy's Disease, Kinsbourne syndrome, Kleine-Levin Syndrome, Klippel-Feil Syndrome, Klippel-Trenaunay Syndrome (KTS), Klüver-Bucy Syndrome, Korsakoffs Amnesic Syndrome, Krabbe Disease, Kugelberg-Welander Disease, Kuru, Lambert-Eaton Myasthenic Syndrome, Landau-Kleffner Syndrome, Lateral Femoral Cutaneous Nerve Entrapment, Lateral Medullary Syndrome, Learning Disabilities, Leigh's Disease, Lennox-Gastaut Syndrome, Lesch-Nyhan Syndrome, Leukodystrophy, Levine-Critchley Syndrome, Lewy Body Dementia, Lipid Storage Diseases, Lipoid Proteinosis, Lissencephaly, Locked-In Syndrome, Lou Gehrig's Disease, Lupus—Neurological Sequelae, Lyme Disease—Neurological Complications, Machado-Joseph Disease, Macrencephaly, Megalencephaly, Melkersson-Rosenthal Syndrome, Meningitis, Meningitis and Encephalitis, Menkes Disease, Meralgia Paresthetica, Metachromatic Leukodystrophy, Microcephaly, Migraine, Miller Fisher Syndrome, Mini Stroke, Mitochondrial Myopathy, Moebius Syndrome, Monomelic Amyotrophy, Motor Neuron Diseases, Moyamoya Disease, Mucolipidoses, Mucopolysaccharidosis, Multi-Infarct Dementia, Multifocal Motor Neuropathy, Multiple Sclerosis, Multiple System Atrophy, Multiple System Atrophy with Orthostatic Hypotension, Muscular Dystrophy, Myasthenia—Congenital, Myasthenia Gravis, Myelinoclastic Diffuse Sclerosis, Myoclonic Encephalopathy of Infants, Myoclonus, Myopathy, Myopathy-Congenital, Myopathy—Thyrotoxic, Myotonia, Myotonia Congenita, Narcolepsy, Neuroacanthocytosis, Neurodegeneration with Brain Iron Accumulation, Neurofibromatosis, Neuroleptic Malignant Syndrome, Neurological Complications of AIDS, Neurological Complications of Lyme Disease, Neurological Consequences of Cytomegalovirus Infection, Neurological Manifestations of Pompe Disease, Neurological Sequelae Of Lupus, Neuromyelitis Optica, Neuromyotonia, Neuronal Ceroid Lipofuscinosis, Neuronal Migration Disorders, Neuropathy—Hereditary, Neurosarcoidosis, Neurosyphilis, Neurotoxicity, Nevus Cavernosus, Niemann-Pick Disease, O'Sullivan-McLeod Syndrome, Occipital Neuralgia, Ohtahara Syndrome, Olivopontocerebellar Atrophy, Opsoclonus Myoclonus, Orthostatic Hypotension, Overuse Syndrome, Pain—Chronic, Pantothenate Kinase-Associated Neurodegeneration, Paraneoplastic Syndromes, Paresthesia, Parkinson's Disease, Paroxysmal Choreoathetosis, Paroxysmal Hemicrania, Parry-Romberg, Pelizaeus-Merzbacher Disease, Pena Shokeir II Syndrome, Perineural Cysts, Periodic Paralyses, Peripheral Neuropathy, Periventricular Leukomalacia, Persistent Vegetative State, Pervasive Developmental Disorders, Phytanic Acid Storage Disease, Pick's Disease, Pinched Nerve, Piriformis Syndrome, Pituitary Tumors, Polymyositis, Pompe Disease, Porencephaly, Post-Polio Syndrome, Postherpetic Neuralgia, Post infectious Encephalomyelitis, Postural Hypotension, Postural Orthostatic Tachycardia Syndrome, Postural Tachycardia Syndrome, Primary Dentatum Atrophy, Primary Lateral Sclerosis, Primary Progressive Aphasia, Prion Diseases, Progressive Hemifacial Atrophy, Progressive Locomotor Ataxia, Progressive Multifocal Leukoencephalopathy, Progressive Sclerosing Poliodystrophy, Progressive Supranuclear Palsy, Prosopagnosia, Pseudo-Torch syndrome, Pseudotoxoplasmosis syndrome, Pseudotumor Cerebri, Psychogenic Movement, Ramsay Hunt Syndrome I, Ramsay Hunt Syndrome II, Rasmussen's Encephalitis, Reflex Sympathetic Dystrophy Syndrome, Refsum Disease, Refsum Disease—Infantile, Repetitive Motion Disorders, Repetitive Stress Injuries, Restless Legs Syndrome, Retrovirus-Associated Myelopathy, Rett Syndrome, Reye's Syndrome, Rheumatic Encephalitis, Riley-Day Syndrome, Sacral Nerve Root Cysts, Saint Vitus Dance, Salivary Gland Disease, Sandhoff Disease, Schilder's Disease, Schizencephaly, Seitelberger Disease, Seizure Disorder, Semantic Dementia, Septo-Optic Dysplasia, Severe Myoclonic Epilepsy of Infancy (SMEI), Shaken Baby Syndrome, Shingles, Shy-Drager Syndrome, Sjogren's Syndrome, Sleep Apnea, Sleeping Sickness, Sotos Syndrome, Spasticity, Spina Bifida, Spinal Cord Infarction, Spinal Cord Injury, Spinal Cord Tumors, Spinal Muscular Atrophy, Spinocerebellar Atrophy, Spinocerebellar Degeneration, Steele-Richardson-Olszewski Syndrome, Stiff-Person Syndrome, Striatonigral Degeneration, Stroke, Sturge-Weber Syndrome, Subacute Sclerosing Panencephalitis, Subcortical Arteriosclerotic Encephalopathy, Short-lasting, Unilateral, Neuralgiform (SUNCT) Headache, Swallowing Disorders, Sydenham Chorea, Syncope, Syphilitic Spinal Sclerosis, Syringohydromyelia, Syringomyelia, Systemic Lupus Erythematosus, Tabes Dorsalis, Tardive Dyskinesia, Tarlov Cysts, Tay-Sachs Disease, Temporal Arteritis, Tethered Spinal Cord Syndrome, Thomsen's Myotonia, Thoracic Outlet Syndrome, Thyrotoxic Myopathy, Tic Douloureux, Todd's Paralysis, Tourette Syndrome, Transient Ischemic Attack, Transmissible Spongiform Encephalopathies, Transverse Myelitis, Traumatic Brain Injury, Tremor, Trigeminal Neuralgia, Tropical Spastic Paraparesis, Troyer Syndrome, Tuberous Sclerosis, Vascular Erectile Tumor, Vasculitis Syndromes of the Central and Peripheral Nervous Systems, Von Economo's Disease, Von Hippel-Lindau Disease (VHL), Von Recklinghausen's Disease, Wallenberg's Syndrome, Werdnig-Hoffman Disease, Wernicke-Korsakoff Syndrome, West Syndrome, Whiplash, Whipple's Disease, Williams Syndrome, Wilson Disease, Wolman's Disease, X-Linked Spinal and Bulbar Muscular Atrophy.

[0349] Various psychological disorders may be treated with pharmaceutical compositions, biocircuits, biocircuit components, effector modules including their SREs or payloads of the present disclosure. As a non-limiting example, the psychological disorders may be Aboulia, Absence epilepsy, Acute stress Disorder, Adjustment Disorders, Adverse effects of medication NOS, Age related cognitive decline, Agoraphobia, Alcohol Addiction, Alzheimer's Disease, Amnesia (also known as Amnestic Disorder), Amphetamine Addiction, Anorexia Nervosa, Anterograde amnesia, Antisocial personality disorder (also known as Sociopathy), Anxiety Disorder (Also known as Generalized Anxiety Disorder), Anxiolytic related disorders, Asperger's Syndrome (now part of Autism Spectrum Disorder), Attention Deficit Disorder (Also known as ADD), Attention Deficit Hyperactivity Disorder (Also known as ADHD), Autism Spectrum Disorder (also known as Autism), Autophagia, Avoidant Personality Disorder, Barbiturate related disorders, Benzodiazepine related disorders, Bereavement, Bibliomania, Binge Eating Disorder, Bipolar disorder (also known as Manic Depression, includes Bipolar I and Bipolar II), Body Dysmorphic Disorder, Borderline intellectual functioning, Borderline Personality Disorder, Breathing-Related Sleep Disorder, Brief Psychotic Disorder, Bruxism, Bulimia Nervosa, Caffeine Addiction, Cannabis Addiction, Catatonic disorder, Catatonic schizophrenia, Childhood amnesia, Childhood Disintegrative Disorder (now part of Autism Spectrum Disorder), Childhood Onset Fluency Disorder (formerly known as Stuttering), Circadian Rhythm Disorders, Claustrophobia, Cocaine related disorders, Communication disorder, Conduct Disorder, Conversion Disorder, Cotard delusion, Cyclothymia (also known as Cyclothymic Disorder), Delerium, Delusional Disorder, dementia, Dependent Personality Disorder (also known as Asthenic Personality Disorder), Depersonalization disorder (now known as Depersonalization/Derealization Disorder), Depression (also known as Major Depressive Disorder), Depressive personality disorder, Derealization disorder (now known as Depersonalization/Derealization Disorder), Dermotillomania, Desynchronosis, Developmental coordination disorder, Diogenes Syndrome, Disorder of written expression, Dispareunia, Dissocial Personality Disorder, Dissociative Amnesia, Dissociative Fugue, Dissociative Identity Disorder (formerly known as Multiple Personality Disorder), Down syndrome, Dyslexia, Dyspareunia, Dysthymia (now known as Persistent Depressive Disorder), Eating disorder NOS, Ekbom's Syndrome (Delusional Parasitosis), Emotionally unstable personality disorder, Encopresis, Enuresis (bedwetting), Erotomania, Exhibitionistic Disorder, Expressive language disorder, Factitious Disorder, Female Sexual Disorders, Fetishistic Disorder, Folie à deux, Fregoli delusion, Frotteuristic Disorder, Fugue State, Ganser syndrome, Gambling Addiction, Gender Dysphoria (formerly known as Gender Identity Disorder), Generalized Anxiety Disorder, General adaptation syndrome, Grandiose delusions, Hallucinogen Addiction, Haltlose personality disorder, Histrionic Personality Disorder, Primary hypersomnia, Huntington's Disease, Hypoactive sexual desire disorder, Hypochondriasis, Hypomania, Hyperkinetic syndrome, Hypersomnia, Hysteria, Impulse control disorder, Impulse control disorder NOS, Inhalant Addiction, Insomnia, Intellectual Development Disorder, Intermittent Explosive Disorder, Joubert syndrome, Kleptomania, Korsakoff's syndrome, Lacunar amnesia, Language Disorder, Learning Disorders, Major Depression (also known as Major Depressive Disorder), major depressive disorder, Male Sexual Disorders, Malingering, Mathematics disorder, Medication-related disorder, Melancholia, Mental Retardation (now known as Intellectual Development Disorder), Misophonia, Morbid jealousy, Multiple Personality Disorder (now known as Dissociative Identity Disorder), Munchausen Syndrome, Munchausen by Proxy, Narcissistic Personality Disorder, Narcolepsy, Neglect of child, Neurocognitive Disorder (formerly known as Dementia), Neuroleptic-related disorder, Nightmare Disorder, Non Rapid Eye Movement, Obsessive-Compulsive Disorder, Obsessive-Compulsive Personality Disorder (also known as Anankastic Personality Disorder), Oneirophrenia, Onychophagia, Opioid Addiction, Oppositional Defiant Disorder, Orthorexia (ON), Pain disorder, Panic attacks, Panic Disorder, Paranoid Personality Disorder, Parkinson's Disease, Partner relational problem, Passive-aggressive personality disorder, Pathological gambling, Pedophilic Disorder, Perfectionism, Persecutory delusion, Persistent Depressive Disorder (also known as Dysthymia), Personality change due to a general medical condition, Personality disorder, Pervasive developmental disorder (PDD), Phencyclidine related disorder, Phobic disorder, Phonological disorder, Physical abuse, Pica, Polysubstance related disorder, Postpartum Depression, Post-traumatic embitterment disorder (PTED), Post-Traumatic Stress Disorder, Premature ejaculation, Premenstrual Dysphoric Disorder, Psychogenic amnesia, Psychological factor affecting medical condition, Psychoneurotic personality disorder, Psychotic disorder, not otherwise specified, Pyromania, Reactive Attachment Disorder, Reading disorder, Recurrent brief depression, Relational disorder, REM Sleep Behavior Disorder, Restless Leg Syndrome, Retrograde amnesia, Retts Disorder (now part of Autism Spectrum Disorder), Rumination syndrome, Sadistic personality disorder, Schizoaffective Disorder, Schizoid Personality Disorder, Schizophrenia, Schizophreniform disorder, Schizotypal Personality Disorder, Seasonal Affective Disorder, Sedative, Hypnotic, or Anxiolytic Addiction, Selective Mutism, Self-defeating personality disorder, Separation Anxiety Disorder, Sexual Disorders Female, Sexual Disorders Male, Sexual Addiction, Sexual Masochism Disorder, Sexual Sadism Disorder, Shared Psychotic Disorder, Sleep Arousal Disorders, Sleep Paralysis, Sleep Terror Disorder (now part of Nightmare Disorder, Social Anxiety Disorder, Somatization Disorder, Specific Phobias, Stendhal syndrome, Stereotypic movement disorder, Stimulant Addiction, Stuttering (now known as Childhood Onset Fluency Disorder), Substance related disorder, Tardive dyskinesia, Tobacco Addiction, Tourettes Syndrome, Transient tic disorder, Transient global amnesia, Transvestic Disorder, Trichotillomania, Undifferentiated Somatoform Disorder, Vaginismus, and Voyeuristic Disorder.

[0350] Various lung diseases may be treated with pharmaceutical compositions, biocircuits, biocircuit components, effector modules including their SREs or payloads of the present disclosure. As a non-limiting example, the lung diseases may be Asbestosis, Asthma, Bronchiectasis, Bronchitis, Chronic Cough, Chronic Obstructive Pulmonary Disease (COPD), Croup, Cystic Fibrosis, Hantavirus, Idiopathic Pulmonary Fibrosis, Pertussis, Pleurisy, Pneumonia, Pulmonary Embolism, Pulmonary Hypertension, Sarcoidosis, Sleep Apnea, Spirometry, Sudden Infant Death Syndrome (SIDS), Tuberculosis, Alagille Syndrome, Autoimmune Hepatitis, Biliary Atresia, Cirrhosis, ERCP (Endoscopic Retrograde Cholangiopancreatography), and Hemochromatosis. Nonalcoholic Steatohepatitis, Porphyria, Primary Biliary Cirrhosis, Primary Sclerosing Cholangitis.

[0351] Various bone diseases may be treated with pharmaceutical compositions, biocircuits, biocircuit components, effector modules including their SREs or payloads of the present disclosure. As a non-limiting example, the bone diseases may be osteoporosis, neurofibromatosis, osteogenesis imperfecta (OI), rickets, osteosarcoma, achondroplasia, fracture, osteomyelitis, Ewing tumor of bone, osteomalacia, hip dysplasia, Paget disease of bone, marble bone disease, osteochondroma, bone cancer, bone disease, osteochondrosis, osteoma, fibrous dysplasia, cleidocranial dysostosis, osteoclastoma, bone cyst, metabolic bone disease, melorheostosis, callus, Caffey syndrome, and mandibulofacial dysostosis.

[0352] Various blood diseases may be treated with pharmaceutical compositions, biocircuits, biocircuit components, effector modules including their SREs or payloads of the present disclosure. As a non-limiting example, the blood diseases may be Anemia and CKD (for health care professionals), Aplastic Anemia and Myelodysplastic Syndromes, Deep Vein Thrombosis, Hemochromatosis, Hemophilia, Henoch-Schonlein Purpura, Idiopathic Thrombocytopenic Purpura, Iron-Deficiency Anemia, Pernicious Anemia, Pulmonary Embolism, Sickle Cell Anemia, Sickle Cell Trait and Other Hemoglobinopathies, Thalassemia, Thrombotic Thrombocytopenic Purpura, and Von Willebrand Disease.

### 8. Gene Editing

[0353] The CRISPR-Cas9 system is a novel genome editing system which has been rapidly developed and implemented in a multitude of model organisms and cell types, and supplants other genome editing technologies, such as TALENs and ZFNs. CRISPRs are sequence motifs are present in bacterial and archaeal genomes and are composed of short (about 24-48 nucleotide) direct repeats separated by similarly sized, unique spacers (Grissa et al. BMC Bioinformatics 8, 172 (2007). They are generally flanked by a set of CRISPR-associated (Cas) protein-coding genes that are required for CRISPR maintenance and function (Barrangou et al., Science 315, 1709 (2007), Brouns et al., Science 321, 960 (2008), Haft et al. PLoS Comput Biol 1, e60 (2005). CRISPR-Cas systems provide adaptive immunity against invasive genetic elements (e.g., viruses, phages and plasmids) (Horvath and Barrangou, Science, 2010, 327: 167-170; Bhaya et al., Annu. Rev. Genet., 2011, 45: 273-297; and Brrangou R, RNA, 2013, 4: 267-278). Three different types of CRISPR-Cas systems have been classified in bacteria and the type II CRISPR-Cas system is most studied. In the bacterial Type II CRISPR-Cas system, small CRISPR RNAs (crRNAs) processed from the pre-repeat-spacer transcript (pre-crRNA) in the presence of a trans-activating RNA (tracrRNA)/Cas9 can form a duplex with the tracrRNA/Cas9 complex. The mature complex is recruited to a target double strand DNA sequence that is complementary to the spacer sequence in the tracrRNA: crRNA duplex to cleave the target DNA by Cas9 endonuclease (Garneau et al., Nature, 2010, 468: 67-71; Jinek et al., Science, 2012, 337: 816-821; Gasiunas et al., Proc. Natl Acad. Sci. USA., 109: E2579-2586; and Haurwitz et al., Science, 2010, 329: 1355-1358). Target recognition and cleavage by the crRNA: tracrRNA/Cas9 complex in the type II CRISPR-CAS system not only requires a sequence in the tracrRNA: crRNA duplex that is a complementary to the target sequence (also called “protospacer” sequence) but also requires a protospacer adjacent motif (PAM) sequence located 3′ end of the protospacer sequence of a target polynucleotide. The PAM motif can vary between different CRISPR-Cas systems.

[0354] CRISPR-Cas9 systems have been developed and modified for use in genetic editing and prove to be a high effective and specific technology for editing a nucleic acid sequence even in eukaryotic cells. Many researchers disclosed various modifications to the bacterial CRISPR-Cas systems and demonstrated that CRISPR-Cas systems can be used to manipulate a nucleic acid in a cell, such as in a mammalian cell and in a plant cell. Representative references include U.S. Pat. Nos. 8,993,233; 8,999,641; 8,945,839; 8,932,814; 8,906,616; 8,895,308; 8,889,418; 8,889,356; 8,871,445; 8,865,406; 8,771,945; and 8,697,359; U.S. Patent Publication Nos. 20150031134; 20150203872; 20150218253; 20150176013; 20150191744; 20150071889; 20150067922; and 20150167000; each of which is incorporated herein by reference in their entirety.

[0355] However, controlling the effects and activity of the CRISPR-Cas system (e.g., guide RNA and nuclease) has been challenging and often can be problematic.

[0356] The biocircuits of the present disclosure and/or any of their components may be utilized in regulating or tuning the CRISPR/Cas9 system in order to optimize its utility.

[0357] In some embodiments, the payloads of the effector modules of the disclosure may include alternative isoforms or orthologs of the Cas9 enzyme.

[0358] The most commonly used Cas9 is derived from Streptococcus pyogenes and the RuvC domain can be inactivated by a D10A mutation and the HNH domain can be inactivated by an H840A mutation.

[0359] In addition to Cas9 derived from S. pyogenes, other RNA guided endonucleases (RGEN) may also be used for programmable genome editing. Cas9 sequences have been identified in more than 600 bacterial strains. Though Cas9 family shows high diversity of amino acid sequences and protein sizes, All Cas9 proteins share a common architecture with a central HNH nuclease domain and a split RuvC/RHase H domain. Examples of Cas9 orthologs from other bacterial strains including but not limited to, Cas proteins identified in Acaryochloris marina MBIC11017; Acetohalobium arabaticum DSM 5501; Acidithiobacillus caldus; Acidithiobacillus ferrooxidans ATCC 23270; Alicyclobacillus acidocaldarius LAA1; Alicyclobacillus acidocaldarius subsp. acidocaldarius DSM 446; Allochromatium vinosum DSM 180; Ammonifex degensii KC4; Anabaena variabilis ATCC 29413; Arthrospira maxima CS-328; Arthrospira platensis str. Paraca; Arthrospira sp. PCC 8005; Bacillus pseudomycoides DSM 12442; Bacillus selenitireducens MLS10; Burkholderiales bacterium 1_1_47; Caldicelulosiruptor becscii DSM 6725; Candidatus desulforudis audaxviator MP104C; Caldicellulosiruptor hydrothermalis 108; Clostridium phage c-st; Clostridium botulinum A3 str. Loch Maree; Clostridium botulinum Ba4 str. 657; Clostridium difficile QCD-63q42; Crocosphaera watsonii WH 8501; Cyanothece sp. ATCC 51142; Cyanothece sp. CCY0110; Cyanothece sp. PCC 7424; Cyanothece sp. PCC 7822; Exiguobacterium sibiricum 255-15; Finegoldia magna ATCC 29328; Ktedonobacter racemifer DSM 44963; Lactobacillus delbrueckii subsp. bulgaricus PB2003/044-T3-4; Lactobacillus salivarius ATCC 11741; Listeria innocua; Lyngbya sp. PCC 8106; Marinobacter sp. ELB17; Methanohalobium evestigatum Z-7303; Microcystis phage Ma-LMM01; Microcystis aeruginosa NIES-843; Microscilla marina ATCC 23134; Microcoleus chthonoplastes PCC 7420; Neisseria meningitidis; Nitrosococcus halophilus Nc4; Nocardiopsis dassonvillei subsp. dassonvillei DSM 43111; Nodularia spumigena CCY9414; Nostoc sp. PCC 7120; Oscillatoria sp. PCC 6506; Pelotomaculum thermopropionicum SI; Petrotoga mobilis SJ95; Polaromonas naphthalenivorans CJ2; Polaromonas sp. J5666; Pseudoalteromonas haloplanktis TAC125; Streptomyces pristinaespiralis ATCC 25486; Streptomyces pristinaespiralis ATCC 25486; Streptococcus thermophilus; Streptomyces viridochromogenes DSM 40736; Streptosporangium roseum DSM 43021; Synechococcus sp. PCC 7335; and Thermosipho africanus TCF52B (Chylinski et al., RNA Biol., 2013; 10(5): 726-737).

[0360] In addition to Cas9 orthologs, other Cas9 variants such as fusion proteins of inactive dCas9 and effector domains with different functions may be served as a platform for genetic modulation. Any of the foregoing enzymes may be useful in the present disclosure.

### 9. Stem Cell Applications

[0361] The biocircuits of the present disclosure and/or any of their components may be utilized in the regulated reprogramming of cells, stem cell engraftment or other application where controlled or tunable expression of such reprogramming factors are useful.

[0362] The biocircuits of the present disclosure may be used in reprogramming cells including stem cells or induced stem cells. Induction of induced pluripotent stem cells (iPSC) was first achieved by Takahashi and Yamanaka (Cell, 2006. 126(4):663-76; herein incorporated by reference in its entirety) using viral vectors to express KLF4, c-MYC, OCT4 and SOX2 otherwise collectively known as KMOS.

[0363] Excisable lentiviral and transposon vectors, repeated application of transient plasmid, episomal and adenovirus vectors have also been used to try to derive iPSC (Chang, C.-W., et al., Stem Cells, 2009. 27(5):1042-1049; Kaji, K., et al., Nature, 2009. 458(7239):771-5; Okita, K., et al., Science, 2008. 322(5903):949-53; Stadtfeld, M., et al., Science, 2008. 322(5903):945-9; Woltjen, K., et al., Nature, 2009; Yu, J., et al., Science, 2009:1172482; Fusaki, N., et al., Proc Jpn Acad Ser B Phys Biol Sci, 2009. 85(8):348-62; each of which is herein incorporated by reference in its entirety).

[0364] DNA-free methods to generate human iPSC has also been derived using serial protein transduction with recombinant proteins incorporating cell-penetrating peptide moieties (Kim, D., et al., Cell Stem Cell, 2009. 4(6): 472-476; Zhou, H., et al., Cell Stem Cell, 2009. 4(5):381-4; each of which is herein incorporated by reference in its entirety), and infectious transgene delivery using the Sendai virus (Fusaki, N., et al., Proc Jpn Acad Ser B Phys Biol Sci, 2009. 85(8): p. 348-62; herein incorporated by reference in its entirety).

[0365] The effector modules of the present disclosure may include a payload comprising any of the genes including, but not limited to, OCT such as OCT4, SOX such as SOX1, SOX2, SOX3, SOX15 and SOX18, NANOG, KLF such as KLF1, KLF2, KLF4 and KLF5, MYC such as c-MYC and n-MYC, REM2, TERT and LIN28 and variants thereof in support of reprogramming cells. Sequences of such reprogramming factors are taught in for example International Application PCT/US2013/074560, the contents of which are incorporated herein by reference in their entirety.

### IV. Dosing and Administrations

[0366] The present disclosure provides methods comprising administering any one or more compositions for immunotherapy to a subject in need thereof. These may be administered to a subject using any amount and any route of administration effective for preventing or treating a clinical condition such as cancer, infection diseases and other immunodeficient diseases.

[0367] Compositions in accordance with the disclosure are typically formulated in dosage unit form for ease of administration and uniformity of dosage. It will be understood, however, that the total daily usage of the compositions of the present disclosure may be decided by the attending physician within the scope of sound medical judgment. The specific therapeutically effective, or prophylactically effective dose level for any particular patient will depend upon a variety of factors including the disorder being treated and the severity of the disorder; the activity of the specific compound employed; the specific composition employed; the age, body weight, general health, sex and diet of the patient; the time of administration, route of administration, previous or concurrent therapeutic interventions and rate of excretion of the specific compound employed; the duration of the treatment; drugs used in combination or coincidental with the specific compound employed; and like factors well known in the medical arts.

[0368] The destabilizing domains (DDs), effector modules and biocircuit systems of the disclosure and compositions comprising the same, may be administered by any route to achieve a therapeutically effective outcome.

[0369] These include, but are not limited to enteral (into the intestine), gastroenteral, epidural (into the dura matter), oral (by way of the mouth), transdermal, peridural, intracerebral (into the cerebrum), intracerebroventricular (into the cerebral ventricles), epicutaneous (application onto the skin), intradermal, (into the skin itself), subcutaneous (under the skin), nasal administration (through the nose), intravenous (into a vein), intravenous bolus, intravenous drip, intraarterial (into an artery), intramuscular (into a muscle), intracardiac (into the heart), intraosseous infusion (into the bone marrow), intrathecal (into the spinal canal), intraperitoneal, (infusion or injection into the peritoneum), intravesical infusion, intravitreal, (through the eye), intracavernous injection (into a pathologic cavity) intracavitary (into the base of the penis), intravaginal administration, intrauterine, extra-amniotic administration, transdermal (diffusion through the intact skin for systemic distribution), transmucosal (diffusion through a mucous membrane), transvaginal, insufflation (snorting), sublingual, sublabial, enema, eye drops (onto the conjunctiva), in ear drops, auricular (in or by way of the ear), buccal (directed toward the cheek), conjunctival, cutaneous, dental (to a tooth or teeth), electro-osmosis, endocervical, endosinusial, endotracheal, extracorporeal, hemodialysis, infiltration, interstitial, intra-abdominal, intra-amniotic, intra-articular, intrabiliary, intrabronchial, intrabursal, intracartilaginous (within a cartilage), intracaudal (within the cauda equine), intracisternal (within the cisterna magna cerebellomedularis), intracorneal (within the cornea), dental intracornal, intracoronary (within the coronary arteries), intracorporus cavernosum (within the dilatable spaces of the corporus cavernosa of the penis), intradiscal (within a disc), intraductal (within a duct of a gland), intraduodenal (within the duodenum), intradural (within or beneath the dura), intraepidermal (to the epidermis), intraesophageal (to the esophagus), intragastric (within the stomach), intragingival (within the gingivae), intraileal (within the distal portion of the small intestine), intralesional (within or introduced directly to a localized lesion), intraluminal (within a lumen of a tube), intralymphatic (within the lymph), intramedullary (within the marrow cavity of a bone), intrameningeal (within the meninges), intramyocardial (within the myocardium), intraocular (within the eye), intraovarian (within the ovary), intrapericardial (within the pericardium), intrapleural (within the pleura), intraprostatic (within the prostate gland), intrapulmonary (within the lungs or its bronchi), intrasinal (within the nasal or periorbital sinuses), intraspinal (within the vertebral column), intrasynovial (within the synovial cavity of a joint), intratendinous (within a tendon), intratesticular (within the testicle), intrathecal (within the cerebrospinal fluid at any level of the cerebrospinal axis), intrathoracic (within the thorax), intratubular (within the tubules of an organ), intratumor (within a tumor), intratympanic (within the aurus media), intravascular (within a vessel or vessels), intraventricular (within a ventricle), iontophoresis (by means of electric current where ions of soluble salts migrate into the tissues of the body), irrigation (to bathe or flush open wounds or body cavities), laryngeal (directly upon the larynx), nasogastric (through the nose and into the stomach), occlusive dressing technique (topical route administration which is then covered by a dressing which occludes the area), ophthalmic (to the external eye), oropharyngeal (directly to the mouth and pharynx), parenteral, percutaneous, periarticular, peridural, perineural, periodontal, rectal, respiratory (within the respiratory tract by inhaling orally or nasally for local or systemic effect), retrobulbar (behind the pons or behind the eyeball), intramyocardial (entering the myocardium), soft tissue, subarachnoid, subconjunctival, submucosal, topical, transplacental (through or across the placenta), transtracheal (through the wall of the trachea), transtympanic (across or through the tympanic cavity), ureteral (to the ureter), urethral (to the urethra), vaginal, caudal block, diagnostic, nerve block, biliary perfusion, cardiac perfusion, photopheresis or spinal.

[0370] In some embodiments, compositions of the present disclosure, may be administered by any of the methods of administration taught in the co-pending commonly owned U.S. Provisional Patent Application No. 62/320,864 filed on Apr. 11, 2016, or in U.S. Provisional Application No. 62/466,596 filed Mar. 3, 2017, and the International Publication WO2017/180587, the contents of each of which are incorporated herein by reference in their entirety.

### Kits and Applications

[0371] The also provides a kit comprising any of the polynucleotides or expression vectors described herein.

[0372] The present disclosure includes a variety of kits for conveniently and/or effectively carrying out methods of the present disclosure. Typically, kits will comprise sufficient amounts and/or numbers of components to allow a user to perform one or multiple treatments of a subject(s) and/or to perform one or multiple experiments.

[0373] In one embodiment, the present disclosure provides kits for inhibiting genes in vitro or in vivo, comprising a biocircuit of the present disclosure or a combination of biocircuits of the present disclosure, optionally in combination with any other suitable active agents.

[0374] The kit may further comprise packaging and instructions and/or a delivery agent to form a formulation composition. The delivery agent may comprise, for example, saline, a buffered solution.

[0375] In additional embodiments, assay screening kits are provided. The kit includes a container for the screening assay. An instruction for the use of the assay and the information about the screening method are to be included in the kit.

[0376] In some embodiments, the DDs, effector modules and biocircuit system and compositions of the disclosure may be used as research tools to investigate protein activity in a biological system such a cell and a subject. In other embodiments, the DDs, effector modules and biocircuit system and compositions of the disclosure may be used for treating a disease such as a cancer and a genetic disorder.

### V. Delivery Modalities and/or Vector

### Vectors

[0377] The present disclosure also provides vectors that package polynucleotides of the disclosure encoding biocircuits, effector modules, SREs (DDs) and payload constructs, and combinations thereof. Vectors of the present disclosure may also be used to deliver the packaged polynucleotides to a cell, a local tissue site or a subject. These vectors may be of any kind, including DNA vectors, RNA vectors, plasmids, viral vectors and particles. Viral vector technology is well known and described in Sambrook et al. (2001, Molecular Cloning: A Laboratory Manual, Cold Spring Harbor Laboratory, New York). Viruses, which are useful as vectors include, but are not limited to lentiviral vectors, adenoviral vectors, adeno-associated viral (AAV) vectors, herpes simplex viral vectors, retroviral vectors, oncolytic viruses, and the like.

[0378] In general, vectors contain an origin of replication functional in at least one organism, a promoter sequence and convenient restriction endonuclease site, and one or more selectable markers e.g. a drug resistance gene.

[0379] As used herein a promoter is defined as a DNA sequence recognized by transcription machinery of the cell, required to initiate specific transcription of the polynucleotide sequence of the present disclosure. Vectors can comprise native or non-native promoters operably linked to the polynucleotides of the disclosure. The promoters selected may be strong, weak, constitutive, inducible, tissue specific, development stage-specific, and/or organism specific. One example of a suitable promoter is the immediate early cytomegalovirus (CMV) promoter sequence. This promoter sequence is a strong constitutive promoter sequence capable of driving high levels of expression of polynucleotide sequence that is operatively linked to it. Another example of a preferred promoter is Elongation Growth Factor-1. Alpha (EF-1. alpha). Other constitutive promoters may also be used, including, but not limited to simian virus 40 (SV40), mouse mammary tumor virus (MMTV), human immunodeficiency virus (HIV), long terminal repeat (LTR), promoter, an avian leukemia virus promoter, an Epstein-Barr virus immediate early promoter, a Rous sarcoma virus promoter as well as human gene promoters including, but not limited to the phosphoglycerate kinase (PGK) promoter, actin promoter, the myosin promoter, the hemoglobin promoter, the Ubiquitin C (Ubc) promoter, the human U6 small nuclear protein promoter and the creatine kinase promoter. In some instances, inducible promoters such as but not limited to metallothionine promoter, glucocorticoid promoter, a progesterone promoter, and a tetracycline promoter may be used. In some embodiments, the promoter may be selected from the following a CMV promoter, comprising a nucleotide sequence of SEQ ID NO. 363, a PGK promoter, comprising a nucleotide sequence of SEQ ID NO. 364, and an EF1a promoter, comprising a nucleotide sequence of SEQ ID NO. 365, or SEQ ID NO. 366.

[0380] In some embodiments, the promoter of the disclosure may be a Tet-ON promoter. Combination of the transcription regulation Tet system with the DDs permits simultaneous control of gene expression and protein stability. Any of the dual-Tet ON-DD systems described by Pedone et al. (2018) doi: https://doi.org/10.1101/404699 may be useful in the present disclosure (the contents of which are herein incorporated by reference in their entirety).

[0381] In some embodiments, the optimal promoter may be selected based on its ability to achieve minimal expression of the SREs and payloads of the disclosure in the absence of the ligand and detectable expression in the presence of the ligand.

[0382] Additional promoter elements e.g. enhancers may be used to regulate the frequency of transcriptional initiation. Such regions may be located 10-100 base pairs upstream or downstream of the start site. In some instances, two or more promoter elements may be used to cooperatively or independently activate transcription.

[0383] In some embodiments, the recombinant expression vector may comprise regulatory sequences, such as transcription and translation initiation and termination codons, which are specific to the type of host cell into which the vector is to be introduced.

### 1. Lentiviral Vectors

[0384] In some embodiments, lentiviral vectors/particles may be used as vehicles and delivery modalities. Lentiviruses are subgroup of the Retroviridae family of viruses, named because reverse transcription of viral RNA genomes to DNA is required before integration into the host genome. As such, the most important features of lentiviral vehicles/particles are the integration of their genetic material into the genome of a target/host cell. Some examples of lentivirus include the Human Immunodeficiency Viruses: HIV-1 and HIV-2, the Simian Immunodeficiency Virus (SIV), feline immunodeficiency virus (FIV), bovine immunodeficiency virus (BIV), Jembrana Disease Virus (JDV), equine infectious anemia virus (EIAV), equine infectious anemia virus, visna-maedi and caprine arthritis encephalitis virus (CAEV).

[0385] Typically, lentiviral particles making up the gene delivery vehicle are replication defective on their own (also referred to as “self-inactivating”). Lentiviruses are able to infect both dividing and non-dividing cells by virtue of the entry mechanism through the intact host nuclear envelope (Naldini L et al., Curr. Opin. Biotechnol, 1998, 9: 457-463). Recombinant lentiviral vehicles/particles have been generated by multiply attenuating the HIV virulence genes, for example, the genes Env, Vif, Vpr, Vpu, Nef and Tat are deleted making the vector biologically safe. Correspondingly, lentiviral vehicles, for example, derived from HIV-1/HIV-2 can mediate the efficient delivery, integration and long-term expression of transgenes into non-dividing cells. As used herein, the term “recombinant” refers to a vector or other nucleic acid containing both lentiviral sequences and non-lentiviral retroviral sequences.

[0386] Lentiviral particles may be generated by co-expressing the virus packaging elements and the vector genome itself in a producer cell such as human HEK293T cells. These elements are usually provided in three (in second generation lentiviral systems) or four separate plasmids (in third generation lentiviral systems). The producer cells are co-transfected with plasmids that encode lentiviral components including the core (i.e. structural proteins) and enzymatic components of the virus, and the envelope protein(s) (referred to as the packaging systems), and a plasmid that encodes the genome including a foreign transgene, to be transferred to the target cell, the vehicle itself (also referred to as the transfer vector). In general, the plasmids or vectors are included in a producer cell line. The plasmids/vectors are introduced via transfection, transduction or infection into the producer cell line. Methods for transfection, transduction or infection are well known by those of skill in the art. As non-limiting example, the packaging and transfer constructs can be introduced into producer cell lines by calcium phosphate transfection, lipofection or electroporation, generally together with a dominant selectable marker, such as neo, DHFR, Gln synthetase or ADA, followed by selection in the presence of the appropriate drug and isolation of clones.

[0387] The producer cell produces recombinant viral particles that contain the foreign gene, for example, the effector module of the present disclosure. The recombinant viral particles are recovered from the culture media and titrated by standard methods used by those of skill in the art. The recombinant lentiviral vehicles can be used to infect target cells.

[0388] Cells that can be used to produce high-titer lentiviral particles may include, but are not limited to, HEK293T cells, 293G cells, STAR cells (Relander et al., Mol. Ther 2005, 11: 452-459), FreeStyle™ 293 Expression System (ThermoFisher, Waltham, Mass.), and other HEK293T-based producer cell lines (e.g., Stewart et al., Hum Gene Ther. 2011, 22 (3):357-369; Lee et al., Biotechnol Bioeng, 2012, 10996): 1551-1560; Throm et al., Blood. 2009, 113(21): 5104-5110; the contents of each of which are incorporated herein by reference in their entirety).

[0389] In some aspects, the envelope proteins may be heterologous envelop proteins from other viruses, such as the G protein of vesicular stomatitis virus (VSV G) or baculoviral gp64 envelop proteins. The VSV-G glycoprotein may especially be chosen among species classified in the vesiculovirus genus: Carajas virus (CJSV), Chandipura virus (CHPV), Cocal virus (COCV), Isfahan virus (ISFV), Maraba virus (MARAV), Piry virus (PIRYV), Vesicular stomatitis Alagoas virus (VSAV), Vesicular stomatitis Indiana virus (V SIV) and Vesicular stomatitis New Jersey virus (VSNJV) and/or stains provisionally classified in the vesiculovirus genus as Grass carp rhabdovirus, BeAn 157575 virus (BeAn 157575), Boteke virus (BTKV), Calchaqui virus (CQIV), Eel virus American (EVA), Gray Lodge virus (GLOV), Jurona virus (JURY), Klamath virus (KLAV), Kwatta virus (KWAV), La Joya virus (LJV), Malpais Spring virus (MSPV), Mount Elgon bat virus (MEBV), Perinet virus (PERV), Pike fry rhabdovirus (PFRV), Porton virus (PORV), Radi virus (RADIV), Spring viremia of carp virus (SVCV), Tupaia virus (TUPV), Ulcerative disease rhabdovirus (UDRV) and Yug Bogdanovac virus (YBV). The gp64 or other baculoviral env protein can be derived from Autographa californica nucleopolyhedrovirus (AcMNPV), Anagrapha falcifera nuclear polyhedrosis virus, Bombyx mori nuclear polyhedrosis virus, Choristoneura fumiferana nucleopolyhedrovirus, Orgyia pseudotsugata single capsid nuclear polyhedrosis virus, Epiphyas postvittana nucleopolyhedrovirus, Hyphantria cunea nucleopolyhedrovirus, Galleria mellonella nuclear polyhedrosis virus, Dhori virus, Thogoto virus, Antheraea pemyi nucleopolyhedrovirus or Batken virus.

[0390] Additional elements provided in lentiviral particles may comprise retroviral LTR (long-terminal repeat) at either 5′ or 3′ terminus, a retroviral export element, optionally a lentiviral reverse response element (RRE), a promoter or active portion thereof, and a locus control region (LCR) or active portion thereof. Other elements include central polypurine tract (cPPT) sequence to improve transduction efficiency in non-dividing cells, Woodchuck Hepatitis Virus (WHP) Posttranscriptional Regulatory Element (WPRE) which enhances the expression of the transgene and increases titer. The effector module is linked to the vector.

[0391] Methods for generating recombinant lentiviral particles are discussed in the art, for example, U.S. Pat. Nos. 8,846,385; 7,745,179; 7,629,153; 7,575,924; 7,179,903; and 6,808,905; the contents of each of which are incorporated herein by reference in their entirety.

[0392] Lentivirus vectors used may be selected from, but are not limited to pLVX, pLenti, pLenti6, pLJM1, FUGW, pWPXL, pWPI, pLenti CMV puro DEST, pLJM1-EGFP, pULTRA, pInducer20, pHIV-EGFP, pCW57.1, pTRPE, pELPS, pRRL, and pLionII.

[0393] Lentiviral vehicles known in the art may also be used (See, U.S. Pat. Nos. 9,260,725; 9,068,199; 9,023,646; 8,900,858; 8,748,169; 8,709,799; 8,420,104; 8,329,462; 8,076,106; 6,013,516; and 5,994,136; International Patent Publication No. WO2012079000; the contents of each of which are incorporated herein by reference in their entirety).

### 2. Retroviral Vectors (γ-Retroviral Vectors)

[0394] In some embodiments, retroviral vectors may be used to package and deliver the biocircuits, biocircuit components, effector modules, SREs or payload constructs of the present disclosure. Retroviral vectors (RVs) allow the permanent integration of a transgene in target cells. In addition to lentiviral vectors based on complex HIV-1/2, retroviral vectors based on simple gamma-retroviruses have been widely used to deliver therapeutic genes and demonstrated clinically as one of the most efficient and powerful gene delivery systems capable of transducing a broad range of cell types. Example species of Gamma retroviruses include the murine leukemia viruses (MLVs) and the feline leukemia viruses (FeLV).

[0395] In some embodiments, gamma-retroviral vectors derived from a mammalian gamma-retrovirus such as murine leukemia viruses (MLVs), are recombinant. The MLV families of gamma retroviruses include the ecotropic, amphotropic, xenotropic and polytropic subfamilies. Ecotropic viruses are able to infect only murine cells using mCAT-1 receptor. Examples of ecotropic viruses are Moloney MLV and AKV. Amphotropic viruses infect murine, human and other species through the Pit-2 receptor. One example of an amphotropic virus is the 4070A virus. Xenotropic and polytropic viruses utilize the same (Xpr1) receptor but differ in their species tropism. Xenotropic viruses such as NZB-9-1 infect human and other species but not murine species, whereas polytropic viruses such as focus-forming viruses (MCF) infect murine, human and other species.

[0396] Gamma-retroviral vectors may be produced in packaging cells by co-transfecting the cells with several plasmids including one encoding the retroviral structural and enzymatic (gag-pol) polyprotein, one encoding the envelope (env) protein, and one encoding the vector mRNA comprising polynucleotide encoding the compositions of the present disclosure that is to be packaged in newly formed viral particles.

[0397] In some aspects, the recombinant gamma-retroviral vectors are pseudotyped with envelope proteins from other viruses. Envelope glycoproteins are incorporated in the outer lipid layer of the viral particles which can increase/alter the cell tropism. Exemplary envelop proteins include the gibbon ape leukemia virus envelope protein (GALV) or vesicular stomatitis virus G protein (VSV-G), or Simian endogenous retrovirus envelop protein, or Measles Virus H and F proteins, or Human immunodeficiency virus gp120 envelope protein, or cocal vesiculovirus envelop protein (See, e.g., U.S. application publication NO. 2012/164118; the contents of which are incorporated herein by reference in its entirety). In other aspects, envelope glycoproteins may be genetically modified to incorporate targeting/binding ligands into gamma-retroviral vectors, binding ligands including, but not limited to, peptide ligands, single chain antibodies and growth factors (Waehler et al., Nat. Rev. Genet. 2007, 8(8):573-587; the contents of which are incorporated herein by reference in its entirety). These engineered glycoproteins can retarget vectors to cells expressing their corresponding target moieties. In other aspects, a “molecular bridge” may be introduced to direct vectors to specific cells. The molecular bridge has dual specificities: one end can recognize viral glycoproteins, and the other end can bind to the molecular determinant on the target cell. Such molecular bridges, for example ligand-receptor, avidin-biotin, and chemical conjugations, monoclonal antibodies and engineered fusogenic proteins, can direct the attachment of viral vectors to target cells for transduction (Yang et al., Biotechnol. Bioeng., 2008, 101(2): 357-368; and Maetzig et al., Viruses, 2011, 3, 677-713; the contents of each of which are incorporated herein by reference in their entirety).

[0398] In some embodiments, the recombinant gamma-retroviral vectors are self-inactivating (SIN) gammaretroviral vectors. The vectors are replication incompetent. SIN vectors may harbor a deletion within the 3′ U3 region initially comprising enhancer/promoter activity. Furthermore, the 5′ U3 region may be replaced with strong promoters (needed in the packaging cell line) derived from Cytomegalovirus or RSV, or an internal promoter of choice, and/or an enhancer element. The choice of the internal promoters may be made according to specific requirements of gene expression needed for a particular purpose of the disclosure.

[0399] In some embodiments, polynucleotides encoding the biocircuit, biocircuit components, effector module, SRE are inserted within the recombinant viral genome. The other components of the viral mRNA of a recombinant gamma-retroviral vector may be modified by insertion or removal of naturally occurring sequences (e.g., insertion of an IRES, insertion of a heterologous polynucleotide encoding a polypeptide or inhibitory nucleic acid of interest, shuffling of a more effective promoter from a different retrovirus or virus in place of the wild-type promoter and the like). In some examples, the recombinant gamma-retroviral vectors may comprise modified packaging signal, and/or primer binding site (PBS), and/or 5′-enhancer/promoter elements in the U3-region of the 5′-long terminal repeat (LTR), and/or 3′-SIN elements modified in the U3-region of the 3′-LTR. These modifications may increase the titers and the ability of infection.

[0400] Gamma retroviral vectors suitable for delivering biocircuit components, effector modules, SREs or payload constructs of the present disclosure may be selected from those disclosed in U.S. Pat. Nos. 8,828,718; 7,585,676; 7,351,585; U.S. application publication NO. 2007/048285; PCT application publication NOs. WO2010/113037; WO2014/121005; WO2015/056014; and EP Pat. NOs. EP1757702; EP1757703 (the contents of each of which are incorporated herein by reference in their entirety).

### Lentiviral Vectors and Cell Engineering

[0401] Lentiviral vectors are used for introducing transgenes into T cells (e.g., primary human T cells or Jurkat cells) for preclinical research and clinical applications, including recently approved products such as Tisagenlecleucel (KYMRIAH®) for relapsed/refractory B-cell lymphoma. VSV-G pseudotyped 3rd generation lentiviral vectors offer high titers, high transduction efficiency and safety, and have become the vectors of choice for T cell engineering. While not wishing to be bound by theory, T cell engineering usually involves T cell activation by CD3/CD28 antibodies, followed by lentivirus transduction, and then cell expansion which can last from 5 to 30 days (e.g., 9 to 14 days or 9 to 15 days). In general, lentivirus transgene integration may take over 7 days to fully stabilize in T cells (e.g., primary human T cells or Jurkat cells). While longer cultures can increase the cell numbers, the longer cultures can also change the T cell phenotype to a more differentiated state. Therefore, the duration of ex vivo culture can impact the persistence and efficacy of CAR T cells. For example, cells cultured for shorter duration may display a less differentiated phenotype and can be highly efficacious in preclinical models.

[0402] While not wishing to be bound by theory, the state of T cell differentiation may influence the engraftment and persistence of T cells following adoptive transfer. Ghassemi et al. (Reducing Ex Vivo Culture Improves the Antileukemic Activity of Chimeric Antigen Receptor (CAR) T Cells. Cancer Immunol Res; 6(9) September 2018; the contents of which are herein incorporated by reference in their entirety) describe primary human T cell differentiation over time and saw that early harvested CAR T cells exhibited enhanced effector function and proliferation, as well as enhanced potency and persistence in vivo.

[0403] Lentivirus dynamics such as transduction, integration and/or expression kinetics of lentivirally introduced transgenes in T cells (e.g., primary human T cells or Jurkat cells) ex vivo may impact the efficacy and durability of in vivo anti-tumor responses. Some type of T cells may produce different results. For example, the Jurkat cell line may not provide the dynamic range of expression as primary human T cells. Methods to evaluate these lentivirus dynamics are known in the art and are described herein.

[0404] In some embodiment, to determine the transgene expression kinetics CD3/CD28 activated primary human T cells can be transduced with lentivirus carrying a transgene (e.g., a regulated transgene or constitutive transgene such as CD19 CAR, IL12, fluorescent protein or any transgene (e.g., payload) described herein). The cells may be analyzed by methods described herein and/or known in the art for viability, viral genomic integration (e.g., by using quantitative PCR), transcript levels (e.g., by using quantitative RT-PCR), and cell surface expression of the transgene if applicable (e.g., if the transgene is or includes CD19 CAR then the surface expression of the CD19 CAR can be evaluated). The cells may be analyzed prior to transduction and/or after transduction such as 1 day, 2 days, 3 days, 4 days, 5 days, 6 days, 7 days, 8 days, 9 days, 10 days, 11 days, 12 days, 13 days, 14 days, 15 days, 16 days, 17 days, 18 days, 19 days, 20 days, 21 days, 22 days, 23 days, 24 days, 25 days, 26 days, 27 days, 28 days, 29 days, 30 or more than 30 days after transduction. As a non-limiting example, the cells may be analyzed at various time points between 3 to 14 days after transduction (e.g., 3 days, 4 days, 5 days, 6 days, 7 days, 8 days, 9 days, 10 days, 11 days, 12 days, 13 days, and/or 14 days). As a non-limiting example, the cells may be analyzed 3 to 15 days after transduction. As a non-limiting example, the cells may be analyzed 9 to 15 days after transduction.

[0405] In some embodiments, the CD3/CD28 activated primary human T cells can be reactivated with CD3/CD28 beads after transduction. The cells may be reactivated 5 days, 6 days, 7 days, 8 days, 9 days, 10 days, 11 days, 12 days, 13 days, 14 days, 15 days, 16 days, 17 days, 18 days, 19 days, 20 days, 21 days, 22 days, 23 days, 24 days, 25 days, 26 days, 27 days, 28 days, 29 days, 30 or more than 30 days after transduction. The cells may be analyzed by methods described herein and/or known in the art for viability, viral genomic integration (e.g., by using quantitative PCR), transcript levels (e.g., by using quantitative RT-PCR), cell surface expression of the transgene if applicable (e.g., if the transgene is or includes CD19 CAR then the surface expression of the CD19 CAR can be evaluated), copy number, and/or mRNA levels.

[0406] In some embodiments, the cell viability of activated primary human T cells transduced with lentivirus carrying a transgene is greater than 65%, 70%, 75%, 80%, 85%, 90%, 95%, 97%, or 99%. As a non-limiting example, the cell viability is greater than 90%. As a non-limiting example, the cell viability is greater than 85%.

[0407] In some embodiments, the cell viability of Jurkat cells transduced with lentivirus carrying a transgene is greater than 65%, 70%, 75%, 80%, 85%, 90%, 95%, 97%, or 99%. As a non-limiting example, the cell viability is greater than 90%. As a non-limiting example, the cell viability is greater than 85%.

[0408] In some embodiments, the integration of the transgene into the genome of the cell may be at or above the saturation point. As a non-limiting example, the saturation point may be 3 copies per cell.

[0409] In some embodiments, the integration of the transgene into the genome may be high in the initial timepoints evaluated and then decline to a lower integration value before becoming stable for the remainder of the culture. As a non-limiting example, the integration may be up to 20 copies per cell of the transgene into the genome during the early timepoints before declining to 2 copies per cell and being stable throughout the remainder of the culture.

[0410] In some embodiments, the transduction of ability of T cells may be evaluated. T cells from at least one donor may be transduced with a lentivirus containing a transgene at a dose that is predicted to reach the saturating levels (e.g., enough virus that each cell should contain a copy if a Poisson distribution is expected) and a higher lentivirus dose that exceeds saturation 5 times. Copies per cell, percentage and MFI of cells (or concentration in media of transgene) may be detected in order to determine if all cells are expressing transgene. As a non-limiting example, T cells from two distinct donors may be transduced with lentivirus which includes a transgene. The transduction may be at two doses, saturation and 5× saturation, and show that 5-10 days after transduction that all groups may reach or exceed a predicted saturating level of integrated transgene and similar expression intensity across groups but not all cells are expressing the transgene. Not all T cells may have equal transduction susceptibility, even when sourced from the same donor. The fraction of total cells that express GFP (above the detection threshold) may vary between donors, lots and/or viral dose. The percent of total cells that express GFP from a single donor may be between 70% and 95%, such as, but not limited to, 70%, 70.1%, 70.2%, 70.3%, 70.4%, 70.5%, 70.6%, 70.7%, 70.8%, 70.9%, 71%, 71.1%, 71.2%, 71.3%, 71.4%, 71.5%, 71.6%, 71.7%, 71.8%, 71.9%, 72%, 72.1%, 72.2%, 72.3%, 72.4%, 72.5%, 72.6%, 72.7%, 72.8%, 72.9%, 73%, 73.1%, 73.2%, 73.3%, 73.4%, 73.5%, 73.6%, 73.7%, 73.8%, 73.9%, 74%, 74.1%, 74.2%, 74.3%, 74.4%, 74.5%, 74.6%, 74.7%, 74.8%, 74.9%, 75%, 75.1%, 75.2%, 75.3%, 75.4%, 75.5%, 75.6%, 75.7%, 75.8%, 75.9%, 76%, 76.1%, 76.2%, 76.3%, 76.4%, 76.5%, 76.6%, 76.7%, 76.8%, 76.9%, 77%, 77.1%, 77.2%, 77.3%, 77.4%, 77.5%, 77.6%, 77.7%, 77.8%, 77.9%, 78%, 78.1%, 78.2%, 78.3%, 78.4%, 78.5%, 78.6%, 78.7%, 78.8%, 78.9%, 79%, 79.1%, 79.2%, 79.3%, 79.4%, 79.5%, 79.6%, 79.7%, 79.8%, 79.9%, 80%, 80.1%, 80.2%, 80.3%, 80.4%, 80.5%, 80.6%, 80.7%, 80.8%, 80.9%, 81%, 81.1%, 81.2%, 81.3%, 81.4%, 81.5%, 81.6%, 81.7%, 81.8%, 81.9%, 82%, 82.1%, 82.2%, 82.3%, 82.4%, 82.5%, 82.6%, 82.7%, 82.8%, 82.9%, 83%, 83.1%, 83.2%, 83.3%, 83.4%, 83.5%, 83.6%, 83.7%, 83.8%, 83.9%, 84%, 84.1%, 84.2%, 84.3%, 84.4%, 84.5%, 84.6%, 84.7%, 84.8%, 84.9%, 85%, 85.1%, 85.2%, 85.3%, 85.4%, 85.5%, 85.6%, 85.7%, 85.8%, 85.9%, 86%, 86.1%, 86.2%, 86.3%, 86.4%, 86.5%, 86.6%, 86.7%, 86.8%, 86.9%, 87%, 87.1%, 87.2%, 87.3%, 87.4%, 87.5%, 87.6%, 87.7%, 87.8%, 87.9%, 88%, 88.1%, 88.2%, 88.3%, 88.4%, 88.5%, 88.6%, 88.7%, 88.8%, 88.9%, 89%, 89.1%, 89.2%, 89.3%, 89.4%, 89.5%, 89.6%, 89.7%, 89.8%, 89.9%, 90%, 90.1%, 90.2%, 90.3%, 90.4%, 90.5%, 90.6%, 90.7%, 90.8%, 90.9%, 91%, 91.1%, 91.2%, 91.3%, 91.4%, 91.5%, 91.6%, 91.7%, 91.8%, 91.9%, 92%, 92.1%, 92.2%, 92.3%, 92.4%, 92.5%, 92.6%, 92.7%, 92.8%, 92.9%, 93%, 93.1%, 93.2%, 93.3%, 93.4%, 93.5%, 93.6%, 93.7%, 93.8%, 93.9%, 94%, 94.1%, 94.2%, 94.3%, 94.4%, 94.5%, 94.6%, 94.7%, 94.8%, 94.9%, or 95%. As a non-limiting example, the percent of total cells expressing GFP in cells from one donor may be 83.8% for a dose of 1 μL and 83.7% or 78.8% for a dose of 5 μL. As another non-limiting example, the percent of total cells expressing GFP in cells from one donor may be 80.6%, 89.1%, or 91.2% for a dose of 1 and 75.1%, 89.6% or 91.7% for a dose of 5 μL.

[0411] In some embodiments, a percentage of the cultured T cells (e.g., primary human T cells and/or Jurkat cells) may express the transgene. The percentage of culture T cells expressing the transgene may be, but is not limited to, 5%, 10%, 15%, 20%, 25%, 30%, 35%, 40%, 45%, 50%, 55%, 60%, 65%, 70%, 75%, 80%, 85%, 90%, 95%, 97%, 99% or greater than 99%. As a non-limiting example, the percentage may be greater than 70%. As a non-limiting example, the percentage may be greater than 75%. As a non-limiting example, the percentage may be greater than 80%. As a non-limiting example, the percentage may be greater than 85%. As a non-limiting example, the percentage may be greater than 90%. As a non-limiting example, the percentage may be greater than 95%.

[0412] In some embodiments, the mRNA levels from the culture may decline over the duration of the study. The decline may not be limited to a specific transgene and the trend may be seen across multiple classes of expressed proteins. In order to increase the mRNA levels, the cells may be reactivated after the mRNA levels decrease from the initial levels. The cells may be reactivated 5 days, 6 days, 7 days, 8 days, 9 days, 10 days, 11 days, 12 days, 13 days, 14 days, 15 days, 16 days, 17 days, 18 days, 19 days, 20 days, 21 days, 22 days, 23 days, 24 days, 25 days, 26 days, 27 days, 28 days, 29 days, 30 or more than 30 days after transduction. As a non-limiting example, in order to increase mRNA levels in the culture, the cells may be reactivated with CD3/CD28 beads 13 days after transduction. As a non-limiting example, in order to increase mRNA levels in the culture, the cells may be reactivated with CD3/CD28 beads 14 days after transduction. As a non-limiting example, in order to increase mRNA levels in the culture, the cells may be reactivated with CD3/CD28 beads 15 days after transduction

[0413] In some embodiments, the surface expression from the culture may decline over the duration of the study. For example, the surface expression may decline between days 3 to 13 days, 3 to 14 days, or 3 to 15 days after transduction. In order to increase the surface expression, the cells may be reactivated after the surface expression decrease from the initial levels. The cells may be reactivated 5 days, 6 days, 7 days, 8 days, 9 days, 10 days, 11 days, 12 days, 13 days, 14 days, 15 days, 16 days, 17 days, 18 days, 19 days, 20 days, 21 days, 22 days, 23 days, 24 days, 25 days, 26 days, 27 days, 28 days, 29 days, 30 or more than 30 days after transduction. As a non-limiting example, in order to increase surface expression in the culture, the cells may be reactivated with CD3/CD28 beads 13 days after transduction. As a non-limiting example, in order to increase surface expression in the culture, the cells may be reactivated with CD3/CD28 beads 14 days after transduction. As a non-limiting example, in order to increase surface expression in the culture, the cells may be reactivated with CD3/CD28 beads 15 days after transduction.

[0414] In some embodiments, the transgene is a CAR such as, but not limited to, CD19 CAR. As a non-limiting example, the CAR is CD19 CAR. The cell viability may be greater than 90% in cells transduced with a CD19 CAR. The cell viability may be greater than 85% in cells transduced with a CD19 CAR. If the cells are primary T cells transduced with a CD19 CAR, then number of viable cells may increase over the initial timepoints before decreasing. If the cells are Jurkat cells transduced with a CD19 CAR, then the number of viable cells may increase for at least 10 days. The number of copies per cell for CD19 CAR transduced cells may be higher for the initial timepoints before decreasing by 50% or more for the later timepoints. The cell surface expression of CD19 CAR may decrease during the course of the study from about 20000 CAR MFI to less than 5000 CAR MFI over a period of 10 days (e.g., day 3 to day 13). After restimulation on day 15 the MFI may increase to above 5000 CAR MFI. The percentage of primary human T cells expressing CAR may be between 40% and 60% for 3-13 days after transduction. The percentage of Jurkat cells expressing CAR may be between 30% and 70% for 3-13 days after transduction. An initial decline of about 20% may be seen between days 3 and 6 after transduction. Restimulation of the T cells may increase the percent of CAR positive cells back to initial percentage levels (e.g., around 60%).

[0415] In some embodiments, the transgene is an interleukin such as, but not limited to, IL12 (e.g., membrane bound IL12 or secreted cytokine IL12), IL15 (e.g., membrane bound IL15), and IL15Ra. As a non-limiting example, the interleukin is IL12. The cell viability may be greater than 90% in cells transduced with IL12. The cell viability may be greater than 85% in cells transduced with IL12. If the cells are primary T cells transduced with IL12, the number of viable cells may increase over the initial timepoints before decreasing. If the cells are Jurkat cells transduced with IL12, the number of viable cells may increase for at least 10 days. The number of copies per cell for IL12 transduced cells may be higher for the initial timepoints before decreasing by 50% or more for the later timepoints. For IL12 transduced primary human T cells, the level of soluble IL12 in the media may drop steadily over the time course of the study with a slight increase visible in the restimulated group. For IL12 transduced Jurkat cells, the level of soluble IL12 in the media may have a drop in IL12 secretion in the first half of the culture with the levels remaining low through the second half of the culture time.

[0416] In some embodiments, the transgene encodes a fluorescent protein such as, but not limited to cytosolic green fluorescence protein (GFP), luciferase, and mCherry. As a non-limiting example, the fluorescent protein is GFP. The cell viability may be greater than 90% in cells transduced with GFP. The cell viability may be greater than 85% in cells transduced with GFP. If the cells are primary T cells transduced with GFP, then the number of viable cells may increase over the initial timepoints before decreasing. If the cells are Jurkat cells transduced with GFP, then the number of viable cells may increase for at least 10 days. The number of copies per cell for GFP transduced cells may be higher for the initial timepoints before decreasing by 50% or more for the later timepoints. The surface expression of the cells may have a steady and rapid decline bottoming out at day 10 with a slight increase if restimulated. The highest level of cell surface expression of GFP in Jurkat cells may be at day 10 (about 35000 GFP MFI) before decreasing for the rest of the study. The percentage of primary human T cells expressing GFP may be around 80% for 3-13 days after transduction. The percentage of Jurkat cells expressing GFP may be around 90% for 3-13 days after transduction.

[0417] In some embodiments, lentivirally engineered cells described herein have genomic DNA integration that stabilizes after an initial decline of copy number, decreasing RNA and surface expression levels over time, and an increase in RNA and surface expression after restimulation.

[0418] In some embodiments, lentivirally engineering cells may be evaluated using the following 14-day method where samples are collected 5 times throughout the culture. On day −1 the T cells (e.g., primary human T cells or Jurkat cells) may be thawed and the CD3/CD28 beads are added. On day 0, the lentivirus for each of the conditions is added (e.g., 4 mL of cells at 0.5e6/mL) and there is a control of non-transduced cells. Double media to 8 mL on day 1 and then double the media to 16 mL on day 2. On day 3, harvest 4 mL and then double media to 24 mL on day 4. Harvest 4 mL on day 6 before doubling media to 40 mL. The cells can be split (e.g., 14 mL 0.5e6 cells/mL) on day 8 and then on day 6 harvest 4 mL before doubling media to 40 mL. 4 mL may be harvested on day 10 before the media is doubled to 20 mL. On day 13, 4 mL are harvested before doubling the media to 32 mL. The culture is split in half and half of the culture is activated (CD3/CD28 activation beads 1:1) and stimulated overnight. On day 14, 4 mL of each stimulated and non-stimulated cells are harvested and the culture is ended. Transgene copy number per cell are assayed by harvesting cells and extracting genomic DNA then quantifying with standard curve qPCR against the endogenous genome and against the transgene sequence, then converting the detected quantities to a ratio. Mean Fluorescence Intensity (MFI) is assayed by FLO on an Attune with appropriate staining for each group. Percent expressing may also be assayed by FLO on an attune quantifying the percent of cells fluorescing above threshold. Soluble payloads can be quantified by harvesting culture supernatant at each marked timepoint and running MesoScale Discovery plate assay (MSD) then normalizing for cell density.

### 3. Adeno-Associated Viral Vectors (AAV)

[0419] In some embodiments, polynucleotides of present disclosure may be packaged into recombinant adeno-associated viral (rAAV) vectors. Such vectors or viral particles may be designed to utilize any of the known serotype capsids or combinations of serotype capsids. The serotype capsids may include capsids from any identified AAV serotypes and variants thereof, for example, AAV1, AAV2, AAV2G9, AAV3, AAV4, AAV4-4, AAV5, AAV6, AAV7, AAV8, AAV9, AAV10, AAV11, AAV12 and AAVrh10.

[0420] In one embodiment, the AAV serotype may be or have a sequence as described in United States Publication No. US20030138772, herein incorporated by reference in its entirety, such as, but not limited to, AAV1 (SEQ ID NO. 6 and 64 of US20030138772), AAV2 (SEQ ID NO. 7 and 70 of US20030138772), AAV3 (SEQ ID NO. 8 and 71 of US20030138772), AAV4 (SEQ ID NO. 63 of US20030138772), AAV5 (SEQ ID NO. 114 of US20030138772), AAV6 (SEQ ID NO. 65 of US20030138772), AAV7 (SEQ ID NO. 1-3 of US20030138772), AAV8 (SEQ ID NO. 4 and 95 of US20030138772), AAV9 (SEQ ID NO. 5 and 100 of US20030138772), AAV10 (SEQ ID NO. 117 of US20030138772), AAV11 (SEQ ID NO. 118 of US20030138772), AAV12 (SEQ ID NO. 119 of US20030138772), AAVrh10 (amino acids 1 to 738 of SEQ ID NO. 81 of US20030138772) or variants thereof. Non-limiting examples of variants include SEQ ID NOs. 9, 27-45, 47-62, 66-69, 73-81, 84-94, 96, 97, 99, 101-113 of US20030138772, the contents of which are herein incorporated by reference in their entirety.

[0421] In one embodiment, the AAV serotype may have a sequence as described in Pulicherla et al. (Molecular Therapy, 2011, 19(6):1070-1078), U.S. Pat. Nos. 6,156,303; 7,198,951; U.S. Patent Publication Nos. US2015/0159173 and US2014/0359799; and International Patent Publication Nos. WO1998/011244, WO2005/033321, and WO2014/14422; the contents of each of which are incorporated herein by reference in their entirety.

[0422] AAV vectors include not only single stranded vectors but self-complementary AAV vectors (scAAVs). scAAV vectors contain DNA which anneals together to form double stranded vector genome. By skipping second strand synthesis, scAAVs allow for rapid expression in the cell.

[0423] The rAAV vectors may be manufactured by standard methods in the art such as by triple transfection, in sf9 insect cells or in suspension cell cultures of human cells such as HEK293 cells.

[0424] The biocircuits, biocircuit components, effector modules, SREs or payload constructs may be encoded in one or more viral genomes to be packaged in the AAV capsids taught herein.

[0425] Such vectors or viral genomes may also include, in addition to at least one or two ITRs (inverted terminal repeats), certain regulatory elements necessary for expression from the vector or viral genome. Such regulatory elements are well known in the art and include for example promoters, introns, spacers, stuffer sequences, and the like.

[0426] In some embodiments, more than one effector module or SRE (e.g. DD) may be encoded in a viral genome.

### 4. Oncolytic Viruses

[0427] In some embodiments, polynucleotides of present disclosure may be packaged into oncolytic viruses, such as vaccine viruses. Oncolytic vaccine viruses may include viral particles of a thymidine kinase (TK)-deficient, granulocyte macrophage (GM)-colony stimulating factor (CSF)-expressing, replication-competent vaccinia virus vector sufficient to induce oncolysis of cells in the tumor (e.g., U.S. Pat. No. 9,226,977).

[0428] In some embodiments, the viral vector of the disclosure may comprise two or more immunotherapeutic agents taught herein, wherein the two or more immunotherapeutic agents may be included in one effector module under the regulation of the same DD. In this case, the two or more immunotherapeutic agents are tuned by the same stimulus simultaneously. In other embodiments, the viral vector of the disclosure may comprise two or more effector modules, wherein each effector module comprises a different immunotherapeutic agent. In this case, the two or more effector modules and immunotherapeutic agents are tuned by different stimuli, providing separately independent regulation of the two or more components.

5. Messenger RNA (mRNA)

[0429] In some embodiments, the effector modules of the disclosure may be designed as a messenger RNA (mRNA). As used herein, the term “messenger RNA” (mRNA) refers to any polynucleotide which encodes a polypeptide of interest and which is capable of being translated to produce the encoded polypeptide of interest in vitro, in vivo, in situ or ex vivo. Such mRNA molecules may have the structural components or features of any of those taught in International Publication No. WO2018151666, the contents of which are incorporated herein by reference in its entirety.

[0430] Polynucleotides of the disclosure may also be designed as taught in, for example, Ribostem Limited in United Kingdom patent application serial number 0316089.2 filed on Jul. 9, 2003, now abandoned, PCT application number PCT/GB2004/002981 filed on Jul. 9, 2004, published as WO2005005622, U.S. patent application national phase entry Ser. No. 10/563,897 filed on Jun. 8, 2006, published as US20060247195, now abandoned, and European patent application national phase entry serial number EP2004743322 filed on Jul. 9, 2004, published as EP1646714, now withdrawn; Novozymes, Inc. in PCT application number PCT/US2007/88060 filed on Dec. 19, 2007, published as WO2008140615, United States patent application national phase entry Ser. No. 12/520,072 filed on Jul. 2, 2009, published as US20100028943, and European patent application national phase entry serial number EP2007874376 filed on Jul. 7, 2009, published as EP2104739; University of Rochester in PCT application number PCT/US2006/46120 filed on Dec. 4, 2006, published as WO2007064952, and U.S. patent application Ser. No. 11/606,995 filed on Dec. 1, 2006, published as US20070141030; BioNTech AG in European patent application serial number EP2007024312 filed Dec. 14, 2007, now abandoned, PCT application number PCT/EP2008/01059 filed on Dec. 12, 2008, published as WO2009077134, European patent application national phase entry serial number EP2008861423 filed on Jun. 2, 2010, published as EP2240572, United States patent application national phase entry Ser. No. 12/735,060 filed Nov. 24, 2010, published as US20110065103, German patent application serial number DE 10 2005 046 490 filed Sep. 28, 2005, PCT application PCT/EP2006/0448 filed Sep. 28, 2006, published as WO2007036366, national phase European patent EP1934345 published Mar. 21, 2012, and national phase U.S. patent application Ser. No. 11/992,638 filed Aug. 14, 2009, published as 20100129877; Immune Disease Institute Inc. in U.S. patent application Ser. No. 13/088,009 filed Apr. 15, 2011, published as US20120046346, and PCT application PCT/US2011/32679 filed Apr. 15, 2011, published as WO20110130624; Shire Human Genetic Therapeutics in U.S. patent application Ser. No. 12/957,340 filed on Nov. 20, 2010, published as US20110244026; Sequitur Inc. in PCT application PCT/US1998/019492 filed on Sep. 18, 1998, published as WO1999014346; The Scripps Research Institute in PCT application number PCT/US2010/00567 filed on Feb. 24, 2010, published as WO2010098861, and United States patent application national phase entry Ser. No. 13/203,229 filed Nov. 3, 2011, published as US20120053333; Ludwig-Maximillians University in PCT application number PCT/EP2010/004681 filed on Jul. 30, 2010, published as WO2011012316; Cellscript Inc. in U.S. Pat. No. 8,039,214 filed Jun. 30, 2008, and granted Oct. 18, 2011, U.S. patent application Ser. No. 12/962,498 filed on Dec. 7, 2010, published as US20110143436, Ser. No. 12/962,468 filed on Dec. 7, 2010, published as US20110143397, Ser. No. 13/237,451 filed on Sep. 20, 2011, published as US20120009649, and PCT applications PCT/US2010/59305 filed Dec. 7, 2010, published as WO2011071931 and PCT/US2010/59317 filed on Dec. 7, 2010, published as WO2011071936; The Trustees of the University of Pennsylvania in PCT application number PCT/US2006/32372 filed on Aug. 21, 2006, published as WO2007024708, and U.S. patent application national phase entry Ser. No. 11/990,646 filed on Mar. 27, 2009, published as US20090286852; Curevac GMBH in German patent application serial numbers DE10 2001 027 283.9 filed Jun. 5, 2001, DE10 2001 062 480.8 filed Dec. 19, 2001, and DE 20 2006 051 516 filed Oct. 31, 2006, all abandoned, European patent numbers EP1392341 granted Mar. 30, 2005, and EP1458410 granted Jan. 2, 2008, PCT application numbers PCT/EP2002/06180 filed Jun. 5, 2002, published as WO2002098443, PCT/EP2002/14577 filed on Dec. 19, 2002, published as WO2003051401, PCT/EP2007/09469 filed on Dec. 31, 2007, published as WO2008052770, PCT/EP2008/03033 filed on Apr. 16, 2008, published as WO2009127230, PCT/EP2006/004784 filed on May 19, 2005, published as WO2006122828, PCT/EP2008/00081 filed on Jan. 9, 2007, published as WO2008083949, and U.S. patent application Ser. No. 10/729,830 filed on Dec. 5, 2003, published as US20050032730, Ser. No. 10/870,110 filed on Jun. 18, 2004, published as US20050059624, Ser. No. 11/914,945 filed on Jul. 7, 2008, published as US20080267873, Ser. No. 12/446,912 filed on Oct. 27, 2009, published as US2010047261, now abandoned, Ser. No. 12/522,214 filed on Jan. 4, 2010, published as US20100189729, Ser. No. 12/787,566 filed on May 26, 2010, published as US20110077287, Ser. No. 12/787,755 filed on May 26, 2010, published as US20100239608, Ser. No. 13/185,119 filed on Jul. 18, 2011, published as US20110269950, and Ser. No. 13/106,548 filed on May 12, 2011, published as US20110311472, all of which are herein incorporated by reference in their entirety.

[0431] In some embodiments, the effector modules may be designed as self-amplifying RNA. “Self-amplifying RNA” as used herein refers to RNA molecules that can replicate in the host resulting in the increase in the amount of the RNA and the protein encoded by the RNA. Such self-amplifying RNA may have structural features or components of any of those taught in International Patent Application Publication No. WO2011005799 (the contents of which are incorporated herein by reference in their entirety).

### VI. Definitions

[0432] At various places in the present specification, features or functions of the compositions of the present disclosure are disclosed in groups or in ranges. It is specifically intended that the present disclosure include each and every individual sub-combination of the members of such groups and ranges. The following is a non-limiting list of term definitions.

[0433] Activity: As used herein, the term “activity” refers to the condition in which things are happening or being done. Compositions of the disclosure may have activity and this activity may involve one or more biological events. In some embodiments, biological events may include cell signaling events. In some embodiments, biological events may include cell signaling events associated protein interactions with one or more corresponding proteins, receptors, small molecules or any of the biocircuit components described herein.

[0434] Approximately: As used herein, the term “approximately” or “about,” as applied to one or more values of interest, refers to a value that is similar to a stated reference value. In certain embodiments, the term “approximately” or “about” refers to a range of values that fall within 25%, 20%, 19%, 18%, 17%, 16%, 15%, 14%, 13%, 12%, 11%, 10%, 9%, 8%, 7%, 6%, 5%, 4%, 3%, 2%, 1%, or less in either direction (greater than or less than) of the stated reference value unless otherwise stated or otherwise evident from the context (except where such number would exceed 100% of a possible value).

[0435] Alkyl: The terms “alkyl”, “alkoxy”, “hydroxyalkyl”, “alkoxy alkyl”, and “alkoxy carbonyl”, as used herein, include both straight and branched chains containing one to twelve carbon atoms, and/or which may or may not be substituted.

[0436] Alkenyl: The terms “alkenyl” and “alkynyl” as used herein alone or as part of a larger moiety shall include both straight and branched chains containing two to twelve carbon atoms.

[0437] Aryl: The term “aryl” as used herein alone or as part of a larger moiety as in “aralkyl”, “aralkoxy”, or “aryloxyalkyl”, refers to monocyclic, bicyclic and tricyclic carbocyclic ring systems having a total of five to fourteen ring members, wherein at least one ring is aromatic and wherein each ring in the system contains 3 to 8 ring members. The term “aryl” may be used interchangeably with the term “aryl ring.”

[0438] Aromatic: The term “aromatic” as used herein, refers to an unsaturated hydrocarbon ring structure with delocalized pi electrons. As used herein “aromatic” may refer to a monocyclic, bicyclic or polycyclic aromatic compound.

[0439] Aliphatic: The term “aliphatic” or “aliphatic group” as used herein, refers to a straight or branched C1-C8 hydrocarbon chain or a monocyclic C3-C8hydrocarbon or bicyclic C8-C12 hydrocarbon which are fully saturated or that contains one or more units of unsaturation, that is completely saturated or that contains one or more units of unsaturation, but which is not aromatic (also referred to herein as “carbocycle” or “cycloalkyl”), and that has a single point of attachment to the rest of the molecule wherein any individual ring in said bicyclic ring system has 3-7 members.

[0440] Associated with: As used herein, the terms “associated with,” “conjugated,” “linked,” “attached,” and “tethered,” when used with respect to two or more moieties, mean that the moieties are physically associated or connected with one another, either directly or via one or more additional moieties that serve as linking agents, to form a structure that is sufficiently stable so that the moieties remain physically associated under the conditions in which the structure is used, e.g., physiological conditions. An “association” need not be strictly through direct covalent chemical bonding. It may also suggest ionic or hydrogen bonding or a hybridization-based connectivity sufficiently stable such that the “associated” entities remain physically associated.

[0441] Biocircuit system: As used herein, a “biocircuit” or “biocircuit system” is defined as a circuit within or useful in biologic systems comprising a stimulus and at least one effector module responsive to a stimulus, where the response to the stimulus produces at least one signal or outcome within, between, as an indicator of, or on a biologic system. Biologic systems are generally understood to be any cell, tissue, organ, organ system or organism, whether animal, plant, fungi, bacterial, or viral. It is also understood that biocircuits may be artificial circuits which employ the stimuli or effector modules taught by the present disclosure and effect signals or outcomes in acellular environments such as with diagnostic, reporter systems, devices, assays or kits. The artificial circuits may be associated with one or more electronic, magnetic, or radioactive components or parts. In the context of the present disclosure, a biocircuit includes a destabilizing domain (DD) biocircuit system.

[0442] Conservative amino acid substitution: As used herein a” conservative amino acid substitution is one in which an amino acid residue is substituted by another amino acid residue having a side chain (R group) with similar properties (e.g. charge or hydrophobicity).

[0443] Destabilized: As used herein, the term “destable,” “destabilize,” destabilizing region” or “destabilizing domain” means a region or molecule that is less stable than a starting, reference, wild-type or native form of the same region or molecule.

[0444] Expression: As used herein, “expression” of a nucleic acid sequence refers to one or more of the following events: (1) production of an RNA template from a DNA sequence (e.g., by transcription); (2) processing of an RNA transcript (e.g., by splicing, editing, 5′ cap formation, and/or 3′ end processing); (3) translation of an RNA into a polypeptide or protein; (4) folding of a polypeptide or protein; and (5) post-translational modification of a polypeptide or protein.

[0445] Feature: As used herein, a “feature” refers to a characteristic, a property, or a distinctive element.

[0446] Formulation: As used herein, a “formulation” includes at least a compound and/or composition of the present disclosure and a delivery agent.

[0447] Fragment: A “fragment,” as used herein, refers to a portion. For example, fragments of proteins may comprise polypeptides obtained by digesting full-length protein. In some embodiments, a fragment of a protein includes at least 3, 4, 5, 6, 7, 8, 9, 10, 11, 12, 13, 14, 15, 16, 17, 18, 19, 20, 25, 30, 35, 40, 45, 50, 55, 60, 65, 70, 75, 80, 85, 90, 95, 100, 150, 200, 250 or more amino acids. In some embodiments, fragments of an antibody include portions of an antibody.

[0448] Functional: As used herein, a “functional” biological molecule is a biological entity with a structure and in a form in which it exhibits a property and/or activity by which it is characterized.

[0449] Heterocycle: The term “heterocycle”, “heterocyclyl”, or “heterocyclic” as used herein refers to monocyclic, bicyclic or tricyclic ring systems having three to fourteen ring members in which one or more ring members is a heteroatom, wherein each ring in the system contains 3 to 7 ring members and is non-aromatic.

[0450] Hotspot: As used herein, a “hotspot” or a “mutational hotspot” refers to an amino acid position in a protein coding gene that is mutated (by substitutions) more frequently relative to elsewhere within the same gene.

[0451] IC₅₀: As used herein, the term “IC₅₀” refers to the concentration of the ligand where the response or binding is reduced to half.

[0452] Immunotherapeutic agent: the term “immunotherapeutic agent” as used herein, refers to the treatment of disease by the induction or restoration of the reactivity of the immune system towards the disease with a biological, pharmaceutical, or chemical compound.

[0453] In vitro: As used herein, the term “in vitro” refers to events that occur in an artificial environment, e.g., in a test tube or reaction vessel, in cell culture, in a Petri dish, etc., rather than within an organism (e.g., animal, plant, or microbe).

[0454] In vivo: As used herein, the term “in vivo” refers to events that occur within an organism (e.g., animal, plant, or microbe or cell or tissue thereof).

[0455] Linker: As used herein, a linker refers to a moiety that connects two or more domains, moieties or entities. In one embodiment, a linker may comprise 10 or more atoms. In a further embodiment, a linker may comprise a group of atoms, e.g., 10-1,000 atoms, and can be comprised of the atoms or groups such as, but not limited to, carbon, amino, alkylamino, oxygen, sulfur, sulfoxide, sulfonyl, carbonyl, and imine. In some embodiments, a linker may comprise one or more nucleic acids comprising one or more nucleotides. In some embodiments, the linker may comprise an amino acid, peptide, polypeptide or protein. In some embodiments, a moiety bound by a linker may include, but is not limited to an atom, a chemical group, a nucleoside, a nucleotide, a nucleobase, a sugar, a nucleic acid, an amino acid, a peptide, a polypeptide, a protein, a protein complex, a payload (e.g., a therapeutic agent), or a marker (including, but not limited to a chemical, fluorescent, radioactive or bioluminescent marker). The linker can be used for any useful purpose, such as to form multimers or conjugates, as well as to administer a payload, as described herein. Examples of chemical groups that can be incorporated into the linker include, but are not limited to, alkyl, alkenyl, alkynyl, amido, amino, ether, thioether, ester, alkylene, heteroalkylene, aryl, or heterocyclyl, each of which can be optionally substituted, as described herein. Examples of linkers include, but are not limited to, unsaturated alkanes, polyethylene glycols (e.g., ethylene or propylene glycol monomeric units, e.g., diethylene glycol, dipropylene glycol, triethylene glycol, tripropylene glycol, tetraethylene glycol, or tetraethylene glycol), and dextran polymers, Other examples include, but are not limited to, cleavable moieties within the linker, such as, for example, a disulfide bond (—S—S—) or an azo bond (—N═N—), which can be cleaved using a reducing agent or photolysis. Non-limiting examples of a selectively cleavable bonds include an amido bond which may be cleaved for example by the use of tris(2-carboxyethyl) phosphine (TCEP), or other reducing agents, and/or photolysis, as well as an ester bond which may be cleaved for example by acidic or basic hydrolysis.

[0456] MOI: As used herein, the term “MOI” refers to the multiplicity of infection which is defined as the average number of virus particles infecting a target cell.

[0457] Modified: As used herein, the term “modified” refers to a changed state or structure of a molecule or entity as compared with a parent or reference molecule or entity. Molecules may be modified in many ways including chemically, structurally, and functionally. In some embodiments, compounds and/or compositions of the present disclosure are modified by the introduction of non-natural amino acids.

[0458] Mutation: As used herein, the term “mutation” refers to a change and/or alteration. In some embodiments, mutations may be changes and/or alterations to proteins (including peptides and polypeptides) and/or nucleic acids (including polynucleic acids). In some embodiments, mutations comprise changes and/or alterations to a protein and/or nucleic acid sequence. Such changes and/or alterations may comprise the addition, substitution and or deletion of one or more amino acids (in the case of proteins and/or peptides) and/or nucleotides (in the case of nucleic acids and or polynucleic acids, e.g., polynucleotides). In some embodiments, wherein mutations comprise the addition and/or substitution of amino acids and/or nucleotides, such additions and/or substitutions may comprise 1 or more amino acid and/or nucleotide residues and may include modified amino acids and/or nucleotides. The resulting construct, molecule or sequence of a mutation, change or alteration may be referred to herein as a mutant.

[0459] Off-target: As used herein, “off target” refers to any unintended effect on any one or more target, gene, cellular transcript, cell, and/or tissue.

[0460] Operably linked: As used herein, the phrase “operably linked” refers to a functional connection between two or more molecules, constructs, transcripts, entities, moieties or the like.

[0461] Protein of interest: As used herein, the terms “proteins of interest” or “desired proteins” include those provided herein and fragments, mutants, variants, and alterations thereof.

[0462] Purine: As used herein, “purine” refers to an aromatic heterocyclic structure, wherein one of the heterocycles is an imidazole ring and one of the heterocycles is a pyrimidine ring.

[0463] Pyrimidine: As used herein, “pyrimidine” refers to an aromatic heterocyclic structure similar to benzene, but wherein two of the carbon atoms are replaced by nitrogen atoms.

[0464] Pyridopyrimidine: As used herein, “Pyridopyrimidine” refers to an aromatic heterocyclic structure, wherein one of the heterocycles is a purine ring and one of the heterocycles is a pyrimidine ring.

[0465] Quinazoline: As used herein, the term, “Quinazoline” refers to an aromatic heterocyclic structure, wherein one of the heterocycles is a benzene ring and one of the heterocycles is a pyrimidine ring.

[0466] Stable: As used herein “stable” refers to a compound or entity that is sufficiently robust to survive isolation to a useful degree of purity from a reaction mixture, and preferably capable of formulation into an efficacious therapeutic agent.

[0467] Stabilized: As used herein, the term “stabilize”, “stabilized,” “stabilized region” means to make or become stable. In some embodiments, stability is measured relative to an absolute value. In some embodiments, stability is measured relative to a secondary status or state or to a reference compound or entity.

[0468] Stimulus response element (SRE): the term “stimulus response element (SRE), as used herein, is a component of an effector module which is joined, attached, linked to or associated with one or more payloads of the effector module and in some instances, is responsible for the responsive nature of the effector module to one or more stimuli. As used herein, the “responsive” nature of an SRE to a stimulus may be characterized by a covalent or non-covalent interaction, a direct or indirect association or a structural or chemical reaction to the stimulus. Further, the response of any SRE to a stimulus may be a matter of degree or kind. The response may be a partial response. The response may be a reversible response. The response may ultimately lead to a regulated signal or output. Such output signal may be of a relative nature to the stimulus, e.g., producing a modulatory effect of between 1 and 100 or a factored increase or decrease such as 2-fold, 3-fold, 4-fold, 5-fold, 10-fold or more. One non-limiting example of an SRE is a destabilizing domain (DD).

[0469] Subject: As used herein, the term “subject” or “patient” refers to any organism to which a composition in accordance with the disclosure may be administered, e.g., for experimental, diagnostic, prophylactic, and/or therapeutic purposes. Typical subjects include animals (e.g., mammals such as mice, rats, rabbits, non-human primates, and humans) and/or plants.

[0470] Therapeutic Agent: The term “therapeutic agent” refers to any agent that, when administered to a subject, has a therapeutic, diagnostic, and/or prophylactic effect and/or elicits a desired biological and/or pharmacological effect. Therapeutic agents of the present disclosure include any of the biocircuit components taught herein either alone or in combination with other therapeutic agents.

[0471] Therapeutically effective amount: As used herein, the term “therapeutically effective amount” means an amount of an agent to be delivered (e.g., nucleic acid, drug, therapeutic agent, diagnostic agent, prophylactic agent, etc.) that is sufficient, when administered to a subject suffering from or susceptible to an infection, disease, disorder, and/or condition, to treat, improve symptoms of, diagnose, prevent, and/or delay the onset of the infection, disease, disorder, and/or condition. In some embodiments, a therapeutically effective amount is provided in a single dose. In some embodiments, a therapeutically effective amount is administered in a dosage regimen comprising a plurality of doses. Those skilled in the art will appreciate that in some embodiments, a unit dosage form may be considered to comprise a therapeutically effective amount of a particular agent or entity if it comprises an amount that is effective when administered as part of such a dosage regimen.

[0472] Triazine: As used herein, “triazine” is a class of nitrogen containing heterocycles with a structure similar to benzene, but wherein three carbon atoms are replaced by nitrogen atoms.

[0473] Treatment or treating: As used herein, the terms “treatment” or “treating” denote an approach for obtaining a beneficial or desired result including and preferably a beneficial or desired clinical result. Such beneficial or desired clinical results include, but are not limited to, one or more of the following: reducing the proliferation of (or destroying) cancerous cells or other diseased, reducing metastasis of cancerous cells found in cancers, shrinking the size of the tumor, decreasing symptoms resulting from the disease, increasing the quality of life of those suffering from the disease, decreasing the dose of other medications required to treat the disease, delaying the progression of the disease, and/or prolonging survival of individuals.

[0474] Tune: As used herein, the term “tune” means to adjust, balance or adapt one thing in response to a stimulus or toward a particular outcome. In one non-limiting example, the SREs and/or DDs of the present disclosure adjust, balance or adapt the function or structure of compositions to which they are appended, attached or associated with in response to particular stimuli and/or environments.

[0475] Variant: As used herein, the term “variant” refers to a first composition (e.g., a first DD or payload), that is related to a second composition (e.g., a second DD or payload, also termed a “parent” molecule). The variant molecule can be derived from, isolated from, based on or homologous to the parent molecule. The term variant can be used to describe either polynucleotides or polypeptides.

### EQUIVALENTS AND SCOPE

[0476] Those skilled in the art will recognize or be able to ascertain using no more than routine experimentation, many equivalents to the specific embodiments in accordance with the disclosure described herein. The scope of the present disclosure is not intended to be limited to the above Description, but rather is as set forth in the appended claims.

[0477] In the claims, articles such as “a,” “an,” and “the” may mean one or more than one unless indicated to the contrary or otherwise evident from the context. Claims or descriptions that include “or” between one or more members of a group are considered satisfied if one, more than one, or all of the group members are present in, employed in, or otherwise relevant to a given product or process unless indicated to the contrary or otherwise evident from the context. The disclosure includes embodiments in which exactly one member of the group is present in, employed in, or otherwise relevant to a given product or process. The disclosure includes embodiments in which more than one, or the entire group members are present in, employed in, or otherwise relevant to a given product or process.

[0478] It is also noted that the term “comprising” is intended to be open and permits but does not require the inclusion of additional elements or steps. When the term “comprising” is used herein, the term “consisting of” is thus also encompassed and disclosed.

[0479] Where ranges are given, endpoints are included. Furthermore, it is to be understood that unless otherwise indicated or otherwise evident from the context and understanding of one of ordinary skill in the art, values that are expressed as ranges can assume any specific value or subrange within the stated ranges in different embodiments of the disclosure, to the tenth of the unit of the lower limit of the range, unless the context clearly dictates otherwise.

[0480] In addition, it is to be understood that any particular embodiment of the present disclosure that falls within the prior art may be explicitly excluded from any one or more of the claims. Since such embodiments are deemed to be known to one of ordinary skill in the art, they may be excluded even if the exclusion is not set forth explicitly herein. Any particular embodiment of the compositions of the disclosure (e.g., any antibiotic, therapeutic or active ingredient; any method of production; any method of use; etc.) can be excluded from any one or more claims, for any reason, whether or not related to the existence of prior art.

[0481] It is to be understood that the words which have been used are words of description rather than limitation, and that changes may be made within the purview of the appended claims without departing from the true scope and spirit of the disclosure in its broader aspects.

### EXAMPLES

[0482] In the examples below, constructs and DDs are referred to by their identifiers (e.g., OT-001737). Additional information regarding the constructs and DDs may be found throughout the specification.

### Example 1. Generation of Novel Ligand Responsive DDs by Mutagenesis Screening

### Study Design

[0483] To engineer constructs that display ligand dependent stability, a candidate ligand binding domain (LBD) is selected and a cell-based screen using yellow fluorescent protein (YFP) as a reporter for protein stability is designed to identify mutants of the candidate LBD possessing the desired characteristics of a destabilizing domain: low protein levels in the absence of a ligand of the LBD, (i.e., low basal stability), large dynamic range, robust and predictable dose-response behavior, and rapid kinetics of degradation (Banaszynski, et al., (2006) Cell; 126(5): 995-1004). The candidate LBD binds to a desired ligand but not endogenous signaling molecules.

[0484] The candidate LBD sequence (as a template) is first mutated using a combination of nucleotide analog mutagenesis and error-prone PCR, to generate libraries of mutants based on the template candidate domain sequence. The libraries generated are cloned in-frame at either the 5′- or 3′-ends of the YFP gene, and a retroviral expression system is used to stably transduce the libraries of YFP fusions into NIH3T3 fibroblasts.

[0485] The transduced NIH3T3 cells are subjected to three to four rounds of sorting using fluorescence-activated cell sorting (FACS) to screen the libraries of candidate DDs. Transduced NIH3T3 cells are cultured in the absence of the high affinity ligand of the ligand binding domain (LBD), and cells that exhibit low levels of YFP expression are selected through FACS.

### Screening Strategy I

[0486] The selected cell population is cultured in the presence of the high affinity ligand of the ligand binding domain for a period of time (e.g., 24 hours), at which point cells are sorted again by FACS. Cells that exhibit high levels of YFP expression are selected through FACS and the selected cell population is split into two groups and treated again with the high affinity ligand of the ligand binding domain at different concentrations; one group is treated with the lower concentration of the ligand and the other is treated with a high concentration of the ligand, for a period of time (e.g., 24 hours), at which point cells are sorted again by FACS. Cells expressing mutants that are responsive to lower concentrations of the ligand are isolated.

[0487] The isolated cells responsive to the lower concentration of the ligand are treated with the ligand again and cells exhibiting low fluorescence levels are collected 4 hours following removal of the ligand from the media. This fourth sorting is designed to enrich cells that exhibit fast kinetics of degradation (Iwamoto et al., Chem Biol. 2010 Sep. 24; 17(9): 981-988).

### Screening Strategy II

[0488] The selected cell population is subject to additional one or more sorts by FACS in the absence of high affinity ligand of LBD and cells that exhibit low levels of YFP expression are selected for further analysis. Cells are treated with high affinity ligand of the ligand binding domain, for a period of time (e.g. 24 hours) and sorted again by FACS. Cells expressing high levels of YFP are selected for through FACS. Cells with high expression of YFP are treated with ligand again and cells exhibiting low fluorescence levels are collected 4 hours following removal of the ligand from the media to enrich cells that exhibit fast kinetics of degradation. Any of the sorting steps may be repeated to identify DDs with ligand dependent stability.

[0489] The cells are recovered after sorting. The identified candidate cells are harvested, and the genomic DNA is extracted. The candidate DDs are amplified by PCR and isolated. The candidate DDs are sequenced and compared to the LBD template to identify the mutations in candidate DDs.

### Example 2. Regulation of IL12 by ER DDs

[0490] HEK 293T cells were transiently transfected with constructs containing ER-DDs fused to flexi IL12 with or without intervening furin site to generate constructs: OT-001569, OT-001737. Cells were then treated with 1 μM Bazedoxifene (BZD) or vehicle control for 24 hours and IL12 levels were measured by MSD assay Table 11.

TABLE 11
IL12 expression

| | | 1 μM | Stabilization |
|---|---|---|---|
| Construct | Vehicle | BZD | Ratio |
| OT-001737 | 10186.4 | 79706.8 | 7.8 |
| OT-001569 | 11529.1 | 109878 | 9.5 |

[0491] Both constructs showed ligand dependent stabilization of IL12 with comparable stabilization ratios indicating that the furin site did not affect IL12 regulation. Transfected HEK293T cell supernatants of both constructs were incubated for 24 hours with HEK-blue IL12 reporter cells, which express human IL12 receptor and STAT-4 reporter (InvivoGen, San Diego, Calif.). Experiments performed in the presence of BZD indicated increased STAT-4 reporter activity when the activity was compared to vehicle control for both constructs. These data suggest that the expressed IL12 is functional.

### Example 3. ER DD Hotspot Mutation Libraries

[0492] Libraries were generated by mutagenizing the estrogen receptor DD mutations N413D and Q502H to every other possible amino acid. The libraries were introduced into HEK293 cells and assayed for ligand-dependent stabilizing activity when fused to flexi IL12 as the payload. The constructs were evaluated in HEK293 cells for basal and ligand-induced expression. Cells were transfected with the constructs and incubated 24 hours post transfection with 1 μM Bazedoxifene (BZD). 24 hours following the incubation with BZD, supernatants were collected and analyzed for IL12p70 using Meso Scale Discovery (MSD) assay. The results are shown in Table 12 as pg/mL.

TABLE 12
IL12 levels with ER DD constructs

| | Mutation | | | |
|---|---|---|---|---|
| | at | | | |
| | positions | | | |
| | Q502 or | | 1 μM | Stabilization |
| Construct | N413 | Vehicle | Bazedoxifene | Ratio |
| OT-001711 | Q502D | 25091.76 | 594674.71 | 23.7 |
| OT-001723 | Q502H | 22806.89 | 310173.70 | 13.6 |
| OT-001691 | N413T | 18307.28 | 236163.91 | 12.9 |
| OT-001708 | Q502R | 14433.4 | 152994.04 | 10.6 |
| OT-001699 | WT | 14165.85 | 131742.41 | 9.3 |
| OT-001707 | N413D | 38747.88 | 333231.77 | 8.6 |
| OT-001703 | N413H | 15560.38 | 129151.15 | 8.3 |
| OT-001690 | N413A | 38146.81 | 278471.71 | 7.3 |
| OT-001702 | N413Q | 32295.36 | 219608.45 | 6.8 |
| OT-001710 | Q502E | 17924.43 | 109339.02 | 6.1 |
| OT-001718 | Q502V | 6651.394 | 37247.81 | 5.6 |
| OT-001697 | N413V | 27365.5 | 150510.25 | 5.5 |
| OT-001712 | Q502A | 17725.2 | 88626.00 | 5 |
| OT-001713 | Q502T | 18899.8 | 92609.02 | 4.9 |
| OT-001720 | Q502N | 38821.67 | 186344.02 | 4.8 |
| OT-001719 | Q502K | 48696.7 | 228874.49 | 4.7 |
| OT-001695 | N413C | 49042.06 | 225593.48 | 4.6 |
| OT-001717 | Q502S | 32837.05 | 137915.61 | 4.2 |
| OT-001698 | N413K | 42083.8 | 155710.06 | 3.7 |
| OT-001700 | N413M | 47368.35 | 161052.39 | 3.4 |
| OT-001692 | N413R | 52035.92 | 171718.54 | 3.3 |
| OT-001725 | Q502L | 26397.36 | 81831.82 | 3.1 |
| OT-001724 | Q502Y | 22833.51 | 68500.53 | 3 |
| OT-001696 | N413S | 41349.58 | 119913.78 | 2.9 |
| OT-001715 | Q502W | 20337.27 | 56944.36 | 2.8 |
| OT-001694 | N413W | 20032.29 | 54087.18 | 2.7 |
| OT-001726 | Q502F | 14250.2 | 35625.50 | 2.5 |
| OT-001722 | Q502I | 28946.44 | 66576.81 | 2.3 |
| OT-001701 | N413I | 53160.05 | 101004.10 | 1.9 |
| OT-001689 | N413E | 13701.46 | 24662.63 | 1.8 |
| OT-001709 | Q502G | 33881.58 | 60986.84 | 1.8 |
| OT-001705 | N413L | 17298.96 | 29408.23 | 1.7 |
| OT-001693 | N413P | 46614.33 | 74582.93 | 1.6 |
| OT-001706 | N413F | 53239.15 | 74534.81 | 1.4 |
| OT-001704 | N413Y | 46751.82 | 65452.55 | 1.4 |
| OT-001688 | N413G | 15876.24 | 20639.11 | 1.3 |
| OT-001714 | Q502P | 23944.71 | 28733.65 | 1.2 |
| OT-001721 | Q502M | 1145726 | 1145726.00 | 1 |
| OT-001716 | Q502C | 49101.45 | 44191.31 | 0.9 |

[0493] A diverse set of stabilizing activities were discovered with this approach. Some of the mutations reduced basal expression i.e. in the absence of ligand e.g. OT-001718. Other mutations enhanced the dynamic range of ligand regulation e.g. OT-001711, OT-001723, OT-001691, and OT-001708. Selection of the DD mutation utilized in a construct may depend on the type of regulation desired i.e. low basal expression and/or enhanced dynamic range of ligand regulation.

### Example 4. ER DD Regulated Tandem IL12-CD19 Tandem CAR Constructs in Transiently Transfected HEK293T Cells

[0494] HEK293T cells were transiently transfected with 1 μg DNA from each construct listed in the first column of Table 13 and incubated in DMEM with 10% FBS at 37° C., 5% CO2 for 24 hrs. Following the incubation, 1 μM of Bazedoxifene (BZD) or vehicle was added and cells were further incubated for 24 hrs. Following the incubation, CD19 CAR expression on the cell surface was quantified using FACS with CD19-Fc reagent, as a measure of transfection efficiency. IL12 levels in the media were quantified using MSD assay for p40. The IL12 and CD19 levels are shown in Table 13, where SD indicates standard deviation and SR indicates stabilization ratio. The stabilization ratio was calculated using the average IL12 values.

TABLE 13
Payload expression in IL12-CD19 CAR tandem constructs

| | | IL12p40 | | | | | |
|---|---|---|---|---|---|---|---|
| | | 1 μM BZD | | DMSO | | | Surface |
| | | Average | | Average | | | CAR |
| Construct ID | Mutation | (pg/ml) | SD | (pg/ml) | SD | SR | (%) |
| OT-001356 | — | | | 203531.67 | 4796.45 | | 40 |
| OT-001569 | T371A, L384M, | 75542.57 | 494.16 | 6443.64 | 92.65 | 11.72 | 0.1 |
| | M421G, N519S, | | | | | | |
| | G521R, Y537S | | | | | | |
| OT-001640 | R335G, L384M, | 2899.54 | 23.91 | 278.95 | 27.78 | 10.39 | 21 |
| | M421G, G521R, | | | | | | |
| | E523G, Y537S, | | | | | | |
| | A546T | | | | | | |
| OT-001642 | L384M, N413D, | 2570.95 | 20.07 | 103.53 | 16.73 | 24.83 | 11 |
| | M421G, G521R, | | | | | | |
| | Y537S | | | | | | |
| OT-001643 | L384M, M421G, | 2216.92 | 33.82 | 310.82 | 18.54 | 7.13 | 15 |
| | N519S, G521R, | | | | | | |
| | Y537S | | | | | | |
| OT-001644 | L384M, M421G, | 2388.95 | 49.46 | 253.89 | 10.69 | 9.41 | 15 |
| | Q502R, G521R, | | | | | | |
| | Y537S | | | | | | |
| OT-001646 | S305N, L384M, | 3673.33 | 150.27 | 238.69 | 12.87 | 15.39 | 18 |
| | M421G, G442V, | | | | | | |
| | G521R, Y537S | | | | | | |
| OT-001647 | R335G, L384M, | 3458.19 | 88.93 | 875.05 | 88.43 | 3.95 | 17 |
| | M421G, N519S, | | | | | | |
| | G521R, Y537S | | | | | | |
| OT-001648 | L384M, M421G, | 2341.77 | 137.35 | 410.12 | 12.15 | 5.71 | 16 |
| | G521R, Y537S | | | | | | |
| HEK293T | — | 0.00 | 0.00 | | | | |

[0495] All constructs tested in Table 13 showed ligand dependent IL12 expression, with stabilization ratios greater than 3. In a similar experimental set up, OT-001641 was tested using 1 μM Bazedoxifene and showed ligand dependent regulation of IL12 levels that was comparable to OT-001640 and OT-001644 with a stabilization ratio of 6. OT-001645 showed 68% CAR surface expression and a stabilization ratio of 5 in the presence of BZD.

[0496] OT-001736 construct was also tested using the same experimental set up. In the absence of ligand, the average IL12 p40 levels were 13364 pg/ml, which increased to 99015 pg/ml in the presence of ligand, resulting in a stabilization ratio of 7.4.

### Example 5. ER DD Regulates IL12 Expressed in Tandem with CD19-CAR in Lentivirus Transduced Primary Human T Cells

[0497] Primary human T cells were expanded with CD3/CD28 Dynabeads, transduced with lentivirus constructs and expanded for 10 days. Beads were removed and cells were frozen. T cells were later thawed and 100,000 cells were treated overnight with different doses of Bazedoxifene (BZD). Transduction efficiency was assessed by flow cytometry using CD19-Fc staining. The response of IL12 in CD19 CAR-IL12 tandem constructs to increasing concentrations of ligand was measured using OT-001736 construct with increasing doses of BZD starting at 0.01 nM to up to 3 μM for 23 hours. IL12 levels were measured using MSD assay. Controls tested in the experiment included OT-001357, which constitutively expresses IL12 and OT-001407, which is not expected to show any IL12 expression. The results are shown in Table 14.

TABLE 14
IL12 (p70) levels pg/ml

| Bazedoxifene | | | |
|---|---|---|---|
| Concentration | OT- | OT- | OT- |
| (nM) | 001407 | 001357 | 001736 |
| 3000.00 | 0.23 | 1080.34 | 158.42 |
| 1000.00 | 0.21 | 1289.31 | 136.87 |
| 333.33 | 0.26 | 1305.01 | 104.63 |
| 111.11 | 0.17 | 1345.32 | 77.50 |
| 37.04 | 0.22 | 1308.23 | 48.20 |
| 12.35 | 0.16 | 1178.63 | 27.79 |
| 4.12 | 0.21 | 1408.39 | 22.85 |
| 1.37 | 0.17 | 1353.44 | 20.80 |
| 0.46 | 0.20 | 1295.35 | 19.04 |
| 0.15 | 0.18 | 1213.58 | 19.26 |
| 0.05 | 0.34 | 1453.81 | 20.75 |
| 0.01 | — | — | 19.48 |

[0498] As little as 0.05 μM BZD induced IL12 expression in the cells expressing OT-001736. A dose dependent increase in IL12 pg/ml levels was observed up until the highest dose tested, i.e., 3 μM. The EC50 was 0.2 μM. As expected, OT-001357, showed high expression of IL12, whereas the expression of IL12 was undetectable in OT-001407 expressing cells.

[0499] Additional ER mutants were tested in primary human T cells as described above, except T cells were treated on day 9 of expansion, and not frozen and thawed prior to the experiment (Table 15). A dose dependent response was observed with all constructs tested.

TABLE 15
IL12 (p70) levels pg/ml

| Bazedoxifene | | | | | |
|---|---|---|---|---|---|
| Concentration | OT- | OT- | OT- | OT- | OT- |
| (nM) | 001357 | 001736 | 001649 | 001652 | 001653 |
| 6000.00 | 8056.87 | 410.80 | 544.20 | 656.15 | 456.38 |
| 3000.00 | 10578.75 | 404.48 | 581.10 | 606.65 | 494.18 |
| 1500.00 | 11035.45 | 387.55 | 503.97 | 553.13 | 462.85 |
| 750.00 | 10692.65 | 345.08 | 448.60 | 437.53 | 390.48 |
| 375.00 | 13485.30 | 298.53 | 407.18 | 393.78 | 332.37 |
| 187.50 | 11135.30 | 188.80 | 248.83 | 218.00 | 203.20 |
| 93.75 | 11783.80 | 131.53 | 177.77 | 140.40 | 166.17 |
| 46.88 | 10945.95 | 76.57 | 120.90 | 100.67 | 103.73 |
| 23.44 | 11258.30 | 54.60 | 109.47 | 91.33 | 92.40 |
| 11.72 | 10850.85 | 45.70 | 91.87 | 76.40 | 82.60 |
| 5.86 | 11802.80 | 37.93 | 90.93 | 80.97 | 82.83 |
| 0.10 | 9723.30 | 39.80 | 96.03 | 65.77 | 78.77 |

### Example 6. ER DD Regulated IL12 Expression In Vivo

[0500] Primary human T cells were activated with CD3/CD28 Dynabeads, transduced with lentivirus construct OT-001736 and expanded for 10 days. Beads were removed from the cell cultures and the T cells were frozen. Transduction efficiency of the T cells was assessed by flow cytometry for CD19-Fc. To evaluate regulation of IL12 protein production in vivo, tests were performed in NSG mice. All murine studies were done in accordance with the Institutional Animal Care and Use approved protocol. Female NSG mice were intravenously injected with Nalm6-luciferase tagged tumor cells, which is a CD19 positive human leukemia cell line. Seven days after tumor transplant, human T cells engineered to express CD19-targeting CAR with or without co-expression of regulated human IL12, were transferred into the mice by tail vein injection (1×10⁶ CD19-CAR positive cells per mouse). Animals were orally dosed with 10, 30 and 100 mg/kg BZD or vehicle 6, 8, and 13 days after T cell transfer, and peripheral blood samples taken at 0, 6, and 24 hours after each Bazedoxifene (BZD) or vehicle (10% DMSO; 90% (20% 2-Hydroxypropyl-β-cyclodextrin) dosing. IL12p70 levels were measured in the plasma by MSD (Table 16). Flow cytometry was also performed on blood samples to quantitate presence of CAR positive T cell numbers in the blood seven, nine and fourteen days after T cell transfer. CAR-Ts could be detected in the blood at all those timepoints.

TABLE 16
Plasma IL12 (p70) levels pg/ml

| Time | OT-001407 | | OT-001357 | | OT-001736 | | | |
|---|---|---|---|---|---|---|---|---|
| After | | 100 | | 100 | | 10 | 30 | 100 |
| First | | mg/kg | | mg/kg | | mg/kg | mg/kg | mg/kg |
| Dose (h) | Vehicle | BZD | Vehicle | BZD | Vehicle | BZD | BZD | BZD |
| 0 | 0.19 | 0.00 | 13229.50 | 12390.85 | 14.53 | 7.24 | 4.95 | 9.34 |
| 6 | 0.18 | 0.00 | 16221.33 | 14603.10 | 17.79 | 7.08 | 9.32 | 39.92 |
| 24 | 0.61 | 0.08 | 28496.88 | 25488.08 | 17.62 | 11.80 | 6.45 | 12.17 |
| 48 | 0.68 | 0.00 | 42766.25 | 36649.69 | 21.45 | 13.80 | 7.91 | 12.30 |
| 54 | 0.80 | 0.00 | 43510.68 | 35768.21 | 25.99 | 13.39 | 17.22 | 62.85 |
| 72 | 0.87 | 0.00 | 54674.38 | 43454.54 | 30.24 | 17.39 | 9.66 | 15.40 |
| 120 | 4.21 | 0.41 | 356425.33 | 335338.75 | 19.88 | — | — | 18.38 |
| 126 | 4.42 | 0.08 | 452725.33 | 398420.00 | 20.50 | — | — | 154.14 |
| 144 | 6.22 | 0.30 | 498157.67 | 491465.25 | 34.00 | — | — | 30.86 |

[0501] Ligand dependent regulation of IL12 was observed at 100 mg/kg. The levels of IL12 demonstrated a pulsatile expression pattern which correlated with the dosing schedule. A 5-9 fold increase in IL12 levels in the plasma was observed 6 hours post dose but declined for 24 hours post dose. Ligand dependent regulation was not observed at the lower doses tested. As expected, OT-001357 showed high IL12 levels both in the presence and absence of ligand while OT-001407 did not show any ligand dependent regulation.

### Example 7. Regulation of CD19 CAR by ER DDs

[0502] Primary T cells were activated with CD3/CD28 Dynabeads at 3:1 Bead: Cell ratio overnight, then transduced with OT-001792 lentivirus. On day 7 of the T cell expansion, CAR expression was measured by flow cytometry with CD19-Fc on cells treated overnight in the presence (34% positive) or absence (0.6% positive) of 1 μM Bazedoxifene. After the T cells had expanded for 10 days, they were mixed with CD19-expressing Nalm6 target cells at ratios of 10:1 and 2.5:1 total T cells:Nalm6 cells and cultured for 3 days. CD19-CAR mediated target cell killing, as measured by a decrease in stably transduced red-fluorescent protein expression from Nalm6 cells detected using the Incucyte® instrument, was observed specifically in the presence of 1 μM Bazedoxifene at both effector:target cell ratios tested.

[0503] Primary T cells were activated with CD3/CD28 Dynabeads at 3:1 Bead:Cell ratio overnight, then transduced with lentiviruses derived from the indicated constructs. On day 7 or day 9 (as indicated) of the T cell expansion, CAR expression was measured by flow cytometry with CD19-Fc on cells incubated for 24 hours with 1 μM Bazedoxifene or 1 μM Raloxifene or DMSO. Both on day 7, the percentage of CAR positive cells obtained with constructs OT-001789, OT-001788, OT-001787, and OT-001786 was approximately 20-27.5%, which increased to about 40-50% in the presence of both ligands. At day 9 the basal percentage of CAR positive cells for the same constructs was even lower at approximately 20% i.e. in the absence of ligand and about 32-45% in the presence of either ligand. The percentage of CAR positive cells was observed for OT-001791 was undetectable in the absence of ligand and about 5% in the presence of ligand, suggesting overall very low expression. This was true at both day 7 and day 9. Constructs OT-001792, OT-001784 and OT-001785 did not show any ligand dependent regulation of CAR expression.

### Example 8. ER DD Regulated IL15-IL15Ra

[0504] T cells were activated with CD3/CD28 beads for 24 hours, transduced with lentivirus corresponding to OT-001727, using either 2 μl or 10 μl of virus. Cells were then expanded for 6 days. T cells were then treated with 1 μM BZD or DMSO for 24 hours.

[0505] Expression of membrane bound IL15-IL15Ra were analyzed by FACS using anti IL15 and anti IL15Ra antibodies and the percentage of cells that were positive for IL15 and IL15Ra cells was calculated (Table 17).

TABLE 17
% IL15-IL15Ra positive cells with ER DD constructs

| | Virus | | 1 μM | Stabilization |
|---|---|---|---|---|
| Construct | Dilution (μl) | DMSO | BZD | Ratio |
| Untransduced | — | 0.02 | | |
| OT-001727 | 10 | 27 | 79 | 3 |
| | 2 | 16 | 65 | 4 |

[0506] The percentage of IL15-IL15Ra double positive T cells increased in the presence of BZD treatment for OT-001727 which showed strong ligand dependent expression of IL15-IL15Ra. Cells treated with both virus dilutions showed similar ligand dependent regulation.

### Example 9. Effect of Payload Positioning within Effector Modules

[0507] The effect of the position of the payload within the construct on its expression was tested. The effect of placement of furin cleavage site between the DD and the payload was also evaluated.

[0508] Human donor T cells were thawed and activated overnight in the presence of CD3/CD28 Dynabeads at 3:1 bead:cell ratio, then transduced with lentivirus related to OT-002158, or OT-001786. Cells were expanded over the course of 10 days, with fresh media added to maintain cells at around 0.5×10\hat{ }6 cells/mL. On day 9, an aliquot of cells was removed, and treated with 1 μM Bazedoxifene overnight or DMSO vehicle control, then stained with 10 μg/mL CD19-Fc. Histograms showing CAR expression from a Live Singlet cell gate were plotted. Data expressed as % CAR+ cells are provided in Table 18.

TABLE 18
% CAR positive cells

| | Vehicle | Bazedoxifene |
|---|---|---|
| OT-002158 | 0.12 | 46.4 |
| OT-001786 | 19.6 | 34.1 |

[0509] ER DDs regulated CD19-CAR with extremely low basal expression when placed N-terminal with a furin cleavage site.

[0510] Similar experiments were performed using constructs shown in Table 19 and Table 20. Human donor T cells were thawed and activated overnight in the presence of CD3/CD28 Dynabeads at 3:1 bead:cell ratio, then transduced with lentivirus from the constructs. Cells were expanded over the course of 10 days, and fresh media was added to maintain cells around 0.5×10\hat{ }6 cells/ml. On day 9, an aliquot of cells were removed, treated with 1 μM Bazedoxifene overnight, then stained with 10 μg/mL CD19-Fc. Histograms showing CAR expression from a Live Singlet cell gate were plotted. The data are shown in Table 19 and Table 20 where data are presented as % CAR positive cells, where SR indicates stabilization ration.

TABLE 19
% CAR positive cells

| | | | Stabilization |
|---|---|---|---|
| Construct | DMSO | Bazedoxifene | Ratio |
| OT-001789 | 40.2 | 45 | 1.12 |
| OT-001788 | 23 | 35.4 | 1.5 |
| OT-001787 | 17 | 39.4 | 2.3 |
| OT-001786 | 19.6 | 34.1 | 1.7 |
| OT-001785 | 14.1 | 38.7 | 2.7 |
| OT-001784 | 45.6 | 44.8 | 1.0 |
| OT-001790 | 0.3 | 0.6 | 2.0 |

TABLE 20
% CAR positive cells

| | | | Stabilization |
|---|---|---|---|
| Construct | DMSO | Bazedoxifene | Ratio |
| OT-002160 | 0.32 | 27.3 | 85.3 |
| OT-002161 | 0.23 | 27.7 | 120.4 |
| OT-002157 | 0.06 | 41.9 | 698.3 |
| OT-002158 | 0.12 | 46.4 | 386.7 |
| OT-002162 | 0.32 | 22.6 | 70.6 |
| OT-002163 | 0.99 | 20 | 20.2 |
| OT-002164 | 0.3 | 21.8 | 72.7 |
| OT-002159 | 0.53 | 29.3 | 55.3 |

[0511] Positioning of the CAR payload at either C or the N terminal resulted in ligand dependent regulation. However, in the absence of ligand (Bazedoxifene), the constructs with payload positioned at the C terminus that were preceded by a furin site (and the DD at the N terminus) showed low expression compared to the constructs with the payload at the N terminal. Accordingly the stabilization ratios obtained with the constructs wherein the payload was positioned at the C terminus were higher (see Table 20) than the constructs where the payload was positioned at N terminus (see Table 19).

### Example 10. In Vitro Efficacy of ER Regulated CARs

[0512] T cells were transduced with OT-00179, OT-002158, OT-001407 or empty vector and expanded as described herein, frozen on day 10. To confirm the expression and function of this large scale expansion for in vivo use, cells were thawed and incubated overnight in the presence of CD3/28 beads (1:1 bead:cell ratio) and with or without 1 μM Bazedoxifene. FACS staining with 1 μg/mL CD19-Fc was performed to measure the surface expression of CD19-CAR. The data are provided in Table 21 as the percentage CAR positive cells.

TABLE 21
% CAR positive cells

| Construct | Vehicle | Bazedoxifene |
|---|---|---|
| Empty vector | 0.62 | |
| OT-001407 | 53.8 | 56.2 |
| OT-001792 | 0.39 | 39.6 |
| OT-002158 | 1.87 | 47.8 |

[0513] Both OT-00179, and OT-002158 showed surface expression in the 40-50% range in the presence of ligand and less than 5% expression in the absence of ligand. As expected, the empty vector did not show any CAR expression and the positive control, OT-001407 showed expression both in the presence and absence of Bazedoxifene.

[0514] To measure Interferon gamma production, T cells transduced with the constructs OT-00179, OT-002158, OT-001407 or empty vector were thawed and co-cultured with Nalm6 target cells (stably expressing NucRed®) at different ratios of transduced T cells (herein referred to as the Effector) and Nalm 6 cells (herein referred to as the Target). Target cell viability was determined by measuring cellular fluorescence over time using the Incucyte instrument. Data presented in Table 22 are expressed as Nalm6 cell area at representative time points (0, 24, and 42 hour (hr)). The lower the numerical value of the Nalm6 area, the higher the cytotoxicity effected by the Effector cells.

TABLE 22
Nalm 6 area

| | Time | Total target area | | | |
|---|---|---|---|---|---|
| Description | (hr) | 10:1 | 3:1 | 1:1 | 0.3:1 |
| Empty Vector | 0 | 52554.46 | 59390.65 | 68615.72 | 67604.36 |
| OT-001407 | 0 | 56558.99 | 60570.95 | 60970.58 | 70869.90 |
| OT-001792 | 0 | 57172.20 | 60708.63 | 62673.31 | 71711.59 |
| OT-002158 | 0 | 57551.74 | 61283.89 | 64550.92 | 69377.03 |
| Empty Vector + | 0 | 50387.36 | 53224.98 | 54420.91 | 60160.90 |
| 1 μM | | | | | |
| Bazedoxifene | | | | | |
| OT-001407 + | 0 | 60283.69 | 57968.49 | 58651.67 | 53764.52 |
| 1 μM | | | | | |
| Bazedoxifene | | | | | |
| OT-001792 + | 0 | 55572.92 | 54788.54 | 67768.82 | 57617.98 |
| 1 μM | | | | | |
| Bazedoxifene | | | | | |
| OT-002158 + | 0 | 55604.92 | 54040.62 | 61210.96 | 53330.66 |
| 1 μM | | | | | |
| Bazedoxifene | | | | | |
| Empty Vector | 24 | 91743.88 | 100280.58 | 117103.90 | 117219.25 |
| OT-001407 | 24 | 37404.09 | 68281.58 | 91200.62 | 117301.10 |
| OT-001792 | 24 | 93991.37 | 105474.34 | 104433.20 | 123175.80 |
| OT-002158 | 24 | 91854.77 | 105491.45 | 112198.15 | 120391.75 |
| Empty Vector + | 24 | 82879.75 | 88853.42 | 91512.43 | 100327.45 |
| 1 μM | | | | | |
| Bazedoxifene | | | | | |
| OT-001407 + | 24 | 47568.34 | 65988.71 | 81409.21 | 83498.15 |
| 1 μM | | | | | |
| Bazedoxifene | | | | | |
| OT-001792 + | 24 | 40606.37 | 67794.87 | 103535.70 | 94217.60 |
| 1 μM | | | | | |
| Bazedoxifene | | | | | |
| OT-002158 + | 24 | 44020.75 | 70051.27 | 90702.75 | 90149.08 |
| 1 μM | | | | | |
| Bazedoxifene | | | | | |
| Empty Vector | 42 | 156703.40 | 172065.10 | 199013.95 | 192491.80 |
| OT-001407 | 42 | 23864.92 | 57624.68 | 103493.26 | 168381.30 |
| OT-001792 | 42 | 156073.75 | 180465.55 | 171919.20 | 197082.75 |
| OT-002158 | 42 | 146938.00 | 174785.15 | 182443.65 | 195959.75 |
| Empty Vector + | 42 | 138796.45 | 147287.05 | 153257.00 | 159070.65 |
| 1 μM | | | | | |
| Bazedoxifene | | | | | |
| OT-001407 + | 42 | 30151.15 | 56384.84 | 101357.43 | 132305.55 |
| 1 μM | | | | | |
| Bazedoxifene | | | | | |
| OT-001792 + | 42 | 25302.71 | 58548.97 | 133539.50 | 143903.95 |
| 1 μM | | | | | |
| Bazedoxifene | | | | | |
| OT-002158 + | 42 | 26321.51 | 65046.55 | 119282.15 | 135259.35 |
| 1 μM | | | | | |
| Bazedoxifene | | | | | |

[0515] Cytotoxic effects were observed only in the presence of ligand at 3:1 and 10:1 Effector:Target ratios.

[0516] Cell culture supernatants were collected from the T cell/Nalm6 cytotoxicity assay co-cultures at 42 hours. Interferon gamma was measured by MSD and is described in Table 23.

TABLE 23
IFN gamma levels (pg/ml)

| | | 1 μM |
|---|---|---|
| Construct | Vehicle | Bazedoxifene |
| Empty vector | 16.36 | 10.42 |
| OT-001407 | 17586.07 | 15316.10 |
| OT-001792 | 91.09 | 7079.60 |
| OT-002158 | 197.70 | 21905.91 |

[0517] IFNg was observed only in the presence of ligand with ER regulated constructs, which correlated with the results obtained with the cytotoxicity assay.

### Example 11. Pharmacokinetics of Bazedoxifene

[0518] CD-1 mice were injected with a single dose of Bazedoxifene at 10, 100, 200 mg/kg by individual body weights and the plasma Bazedoxifene concentrations were measured over several hours by LC-MS-MS. The vehicle used was (10% DMSO; 90% (20% 2-Hydroxypropyl-β-cyclodextrin)). The plasma concentrations of free and bound Bazedoxifene combined are shown in Table 24.

TABLE 24
Plasma Bazedoxifene Concentrations

| Hours | | | | | | | | | |
|---|---|---|---|---|---|---|---|---|---|
| post | Bazedoxifene | | | Bazedoxifene | | | Bazedoxifene | | |
| dose | 10 mg/kg | | | 100 mg/kg | | | 200 mg/kg | | |
| 0.25 | 0.062 | 0.127 | 0.287 | 1.268 | 0.949 | 2.590 | 1.064 | 1.495 | 1.013 |
| 0.5 | 0.071 | 0.050 | 0.091 | 2.113 | 2.208 | 4.544 | 1.507 | 2.314 | 1.707 |
| 1 | 0.097 | 0.089 | 0.105 | 3.588 | 2.590 | 5.138 | 2.399 | 3.397 | 4.013 |
| 2 | 0.077 | 0.096 | 0.107 | 2.824 | 2.272 | 4.161 | 3.270 | 2.590 | 3.567 |
| 4 | 0.049 | 0.053 | 0.055 | 1.384 | 1.208 | 1.902 | 1.577 | 1.327 | 2.357 |
| 7 | 0.034 | 0.036 | 0.035 | 0.894 | 0.463 | 0.970 | 0.866 | 0.726 | 1.189 |
| 10 | 0.033 | 0.028 | 0.016 | 0.754 | 0.497 | 0.713 | 0.699 | 0.732 | 0.715 |
| 24 | 0.005 | 0.003 | 0.004 | 0.023 | 0.179 | 0.025 | 0.297 | 0.314 | 0.180 |

[0519] Murine Cmax value for Bazedoxifene (˜3 μM) is achieved at a dose of 200 mg/kg per os (PO) and human Cmax for Bazedoxifene (˜0.1 μM) value is known to be 3 mg intravenous (IV).

### Example 12. In Vivo Efficacy of ER Regulated CARs

[0520] Nalm6 cells were transfected with Redifect Red-FlucPuro (Perkin Elmer) under selection using 2 μg/ml puromycin to generate a line that stably expressed the luciferase reporter; thereafter named Nalm6-Luc. Ten days before tumor implantation, Nalm6-Luc cells were thawed and cultured in 1 μg/ml puromycin-containing media. On day 0, cells were counted, resuspended in PBS and 1 million cells were injected into 6-8-week-old female NSG mice via tail vein. On day 6, mice were imaged for bioluminescent intensity (BLI) and sorted into groups based on their tumor burden, determined by BLI signal intensity, to ensure an even distribution across dosing groups. Animals were administered a preloading dose of vehicle or ligand after randomization into their assigned groups. T cells activated with CD3/CD28 Dynabeads, transduced with lentiviral vectors carrying the constructs OT-00179, OT-002158, OT-001407 and expanded for 10 days then frozen. On day 7 post tumor implant, mice were administered another preloading dose of vehicle or ligand, then T cells were thawed and injected via tail vein into the mice at 5 million CAR+ cells per mouse. Animals were orally dosed once a day for 25 days with the one of the following doses of Bazedoxifene: 50, 100 or 200 mg/kg body weight. Body weight and tumor measurements, performed using bioluminescent imaging, were collected at 6, 14, 21, 24, 27, and 31 days post implant. The total flux (photons/second) was measured and is shown in Table 25. In Table 25, BZA indicates Bazedoxifene, QD indicates quaque die (or daily dosing).

TABLE 25
Total Flux (photons/second)

| | Days post tumor implant | | | |
|---|---|---|---|---|
| Construct | 6 | 14 | 21 | 24 |
| Empty Vector | 1.39E+06 | 5.28E+07 | 1.83E+09 | 2.88E+09 |
| Vehicle | 1.07E+06 | 3.13E+07 | 1.14E+09 | 3.25E+09 |
| | 2.00E+06 | 2.94E+07 | 1.71E+09 | 4.65E+09 |
| | 1.39E+06 | 4.52E+07 | 1.95E+09 | 4.38E+09 |
| | 2.04E+06 | 4.01E+07 | 2.03E+09 | 6.08E+09 |
| | 2.53E+06 | 4.98E+08 | — | — |
| | 1.73E+06 | 5.40E+07 | 1.99E+09 | 7.40E+09 |
| | 1.72E+06 | 7.92E+07 | 2.52E+09 | 5.77E+09 |
| OT-001407- | 1.07E+06 | 1.43E+06 | 4.25E+05 | 1.57E+06 |
| Vehicle (BZA) | 2.48E+06 | 1.57E+07 | 1.05E+06 | 2.48E+08 |
| | 1.72E+06 | 1.48E+06 | 1.34E+06 | 2.20E+06 |
| | 1.40E+06 | 2.69E+06 | 3.11E+06 | 2.09E+06 |
| | 1.73E+06 | 3.57E+05 | 1.29E+06 | 3.52E+06 |
| | 1.97E+06 | 2.75E+06 | 9.84E+05 | 1.66E+06 |
| | 1.37E+06 | 2.11E+06 | 1.08E+06 | 2.05E+06 |
| | 2.04E+06 | 2.23E+06 | 1.59E+06 | 3.48E+06 |
| OT-001407- | 2.40E+06 | 7.79E+05 | 8.59E+05 | 9.27E+05 |
| Vehicle | 1.69E+06 | 7.84E+05 | 7.27E+05 | 6.98E+05 |
| | 1.96E+06 | 7.92E+05 | 7.78E+05 | 9.68E+05 |
| | 1.75E+06 | 4.53E+05 | 6.89E+05 | 8.41E+05 |
| | 2.05E+06 | 7.56E+05 | 7.20E+05 | 9.95E+05 |
| | 1.08E+06 | 7.74E+05 | 6.84E+05 | 9.21E+05 |
| | 1.42E+06 | 6.28E+05 | 8.74E+05 | 7.86E+05 |
| | 1.35E+06 | 7.19E+05 | 7.97E+05 | 1.03E+06 |
| OT-001407- | 1.76E+06 | — | — | — |
| BZA 200 | 1.34E+06 | 1.18E+06 | 8.31E+05 | 5.98E+05 |
| mg/kg QD | 1.69E+06 | 8.51E+05 | 8.46E+05 | 1.42E+06 |
| | 2.40E+06 | 5.16E+05 | 6.93E+05 | 1.35E+06 |
| | 1.93E+06 | 1.21E+06 | 1.28E+06 | 2.24E+06 |
| | 1.42E+06 | 1.07E+06 | 9.35E+05 | 2.03E+06 |
| | 1.11E+06 | 1.07E+06 | 9.87E+05 | 1.52E+06 |
| | 2.07E+06 | 1.17E+06 | 9.04E+05 | 1.26E+06 |
| OT-00179 - | 2.10E+06 | 1.12E+08 | 1.82E+09 | 4.09E+09 |
| Vehicle | 1.32E+06 | 1.28E+08 | 2.64E+07 | 4.49E+07 |
| | 1.17E+06 | 7.67E+07 | 1.45E+08 | 5.61E+09 |
| | 1.78E+06 | 7.18E+07 | 7.93E+06 | 4.90E+09 |
| | 1.50E+06 | 4.32E+07 | 1.31E+09 | 3.75E+09 |
| | 1.66E+06 | 1.20E+08 | 9.32E+08 | 3.92E+09 |
| | 1.88E+06 | — | — | — |
| | 2.34E+06 | 1.60E+06 | 1.66E+09 | 8.84E+08 |
| OT-00179 - | 1.79E+06 | 2.23E+06 | 9.82E+06 | 4.17E+07 |
| BZA 200 | 2.10E+06 | 8.21E+05 | 9.99E+05 | 1.31E+06 |
| mg/kg QD | 2.31E+06 | 4.85E+05 | 2.91E+06 | 1.11E+07 |
| | 1.88E+06 | 5.13E+05 | 7.92E+06 | 3.52E+07 |
| | 1.65E+06 | 1.33E+06 | 1.39E+06 | 5.03E+05 |
| | 1.51E+06 | 1.26E+06 | 4.05E+06 | 6.55E+05 |
| | 1.31E+06 | 1.41E+06 | 3.64E+06 | 1.23E+07 |
| | 1.18E+06 | 1.60E+06 | 2.08E+06 | 8.73E+06 |
| | 1.63E+06 | 1.14E+08 | 1.04E+08 | 6.11E+09 |
| OT-002158- | 2.11E+06 | 1.83E+08 | 2.40E+09 | 4.82E+09 |
| Vehicle (BZA) | 1.53E+06 | 8.65E+07 | 2.13E+09 | 4.26E+09 |
| | 1.30E+06 | 7.39E+07 | 1.50E+09 | 2.72E+09 |
| | 1.18E+06 | 8.01E+07 | 1.47E+09 | 3.54E+09 |
| | 2.25E+06 | 2.13E+08 | 2.39E+09 | 9.56E+09 |
| | 1.79E+06 | 7.48E+07 | 1.36E+09 | 3.95E+09 |
| | 1.87E+06 | 7.44E+07 | 1.77E+09 | 4.34E+09 |
| OT-002158 - | 1.22E+06 | — | — | — |
| BZA 200 | 1.54E+06 | — | — | — |
| mg/kg QD | 2.12E+06 | 1.24E+06 | 5.08E+05 | 4.77E+06 |
| | 1.60E+06 | 2.01E+06 | 1.33E+07 | 4.26E+07 |
| | 1.81E+06 | 1.64E+06 | 6.47E+06 | 4.75E+07 |
| | 1.30E+06 | 1.22E+06 | 5.13E+05 | 1.76E+06 |
| | 2.21E+06 | 1.62E+06 | 3.21E+06 | 1.32E+07 |
| | 1.86E+06 | 1.72E+06 | 9.03E+06 | 2.80E+07 |
| OT-002158 - | 2.20E+06 | 1.21E+07 | 4.85E+06 | 5.13E+07 |
| BZA 100 | 1.22E+06 | 1.58E+06 | 4.83E+05 | 1.59E+06 |
| mg/kg QD | 1.55E+06 | 1.56E+06 | 3.55E+06 | 7.62E+05 |
| | 1.26E+06 | 8.65E+05 | 1.91E+06 | 6.28E+05 |
| | 1.81E+06 | 6.67E+05 | 5.72E+05 | 7.21E+05 |
| | 1.84E+06 | 2.03E+06 | 7.24E+06 | 1.97E+07 |
| | 1.59E+06 | 1.78E+06 | 3.39E+07 | 8.83E+05 |
| | 2.13E+06 | 2.25E+06 | 2.27E+06 | 1.09E+07 |
| OT-002158 - | 2.20E+06 | 2.79E+07 | 9.67E+07 | 5.51E+08 |
| BZA 50 | 1.24E+06 | — | — | — |
| mg/kg QD | 1.56E+06 | 8.12E+06 | 6.20E+06 | 4.40E+07 |
| | 1.83E+06 | 1.27E+07 | 6.62E+05 | 1.42E+06 |
| | 1.82E+06 | 4.78E+06 | 8.05E+05 | 1.96E+08 |
| | 1.58E+06 | 6.94E+06 | — | — |
| | 2.15E+06 | 5.69E+07 | 2.16E+08 | 3.81E+06 |
| | 1.23E+06 | 6.34E+05 | 9.93E+05 | 3.67E+07 |

[0521] Mice infused with OT-00179, and OT-002158 expressing T cells demonstrated a reduction in total flux in the cohorts treated with Bazedoxifene compared to vehicle control suggesting a decrease in tumor burden. The extent of reduction in tumor burden correlated with the dose of Bazedoxifene administered to the mice. Mice infused with OT-001407 construct showed similar tumor burden in both the vehicle control and the Bazedoxifene cohorts indicating that the expression and function of the chimeric antigen receptors are not affected by the ligand in the absence of the ER domains.

[0522] Nalm6 cells were transfected with Redifect Red-FlucPuro (Perkin Elmer) under selection using 2 μg/ml puromycin to generate a line that stably expressed the luciferase reporter; thereafter named Nalm6-Luc. Ten days before tumor implantation, Nalm6-Luc cells were thawed and cultured in 1 μg/ml puromycin-containing media. On day 0, cells were counted, resuspended in PBS and 1 million cells were injected into 6-8 week-old female NSG mice via tail vein. On day 6, mice were imaged for bioluminescent intensity (BLI) and sorted into groups based on their tumor burden, determined by BLI signal intensity, to ensure an even distribution across dosing groups. Animals were administered a preloading dose of vehicle or ligand after randomization into their assigned groups. T cells activated with CD3/CD28 Dynabeads, transduced with lentiviral vectors carrying the constructs OT-002158, OT-001407 and expanded for 10 days then frozen. On day 7 post tumor implant, mice were administered another preloading dose of vehicle or ligand, then T cells were thawed and injected via tail vein into the mice at 5 million CAR+ cells per mouse. Animals were orally dosed once a day with vehicle or Bazedoxifene 200 mg/kg body weight. Body weight and tumor measurements, performed using bioluminescent imaging, were collected at 6, 13, 19 and 22 days post implant. The total flux (photons/second) was measured and is shown in Table 26. In Table 26, BZA indicates Bazedoxifene, QD indicates quaque die (or daily dosing). Blood was collected from animals at 14 and 21 days post tumor implant and analyzed by flow cytometry for total T cells (Table 27) and frequency of CAR expression (Table 28).

TABLE 26
Total Flux (photons/second)

| | Days post implant | | | |
|---|---|---|---|---|
| Construct | 6 | 13 | 19 | 22 |
| Empty Vector | 2.45E+06 | 1.54E+08 | 2.01E+09 | 4.14E+09 |
| | 3.25E+06 | 1.71E+08 | 1.81E+09 | 3.77E+09 |
| | 4.86E+06 | 3.04E+08 | 1.36E+07 | 3.40E+07 |
| | 3.92E+06 | 2.18E+08 | 1.24E+07 | 4.23E+09 |
| OT-001407 - | 2.48E+06 | 9.14E+05 | 1.04E+06 | 9.00E+05 |
| Vehicle | 5.82E+06 | 8.41E+05 | 9.21E+05 | 6.18E+05 |
| | 4.06E+06 | 7.19E+05 | 8.89E+05 | 7.10E+05 |
| | 3.04E+06 | 1.18E+06 | 4.31E+06 | 5.31E+05 |
| OT-002158 - | 6.01E+06 | 5.15E+08 | 4.38E+09 | 7.63E+09 |
| Vehicle | 2.78E+06 | 1.66E+08 | 2.76E+09 | 4.15E+09 |
| | 2.09E+06 | 2.77E+08 | 2.98E+08 | 3.20E+09 |
| | 3.48E+06 | 1.94E+08 | 3.11E+09 | 4.73E+09 |
| OT-002158 - | 6.05E+06 | 6.77E+05 | 5.68E+05 | 1.11E+06 |
| BZA 200 | 2.06E+06 | 9.95E+05 | 9.14E+05 | 7.18E+05 |
| mg/kg QD | 3.42E+06 | 8.10E+05 | 1.13E+06 | 9.91E+05 |
| | 2.82E+06 | 1.03E+06 | 1.21E+06 | 1.14E+06 |

TABLE 27
Total T cells

| | Day 14 | | | | Day 21 | | | |
|---|---|---|---|---|---|---|---|---|
| | Animal | Animal | Animal | Animal | Animal | Animal | Animal | Animal |
| Construct | 1 | 2 | 3 | 4 | 1 | 2 | 3 | 4 |
| Empty vector | 38 | 38 | 89 | 28 | 20 | 16 | 27 | 8 |
| OT-001407 | 355 | | 276 | 224 | 364 | 171 | 81 | 108 |
| OT-002158 - | 130 | 162 | 216 | 109 | 60 | 82 | 59 | 92 |
| Vehicle | | | | | | | | |
| OT-002158 - | 847 | 737 | 492 | 625 | 317 | 1674 | 159 | 323 |
| BZA | | | | | | | | |

TABLE 28
% CAR positive cells

| Construct | Day 14 | | | | Day 21 | | | |
|---|---|---|---|---|---|---|---|---|
| Empty vector | 0 | 1 | 1 | 0 | 18 | 10 | 12 | 7 |
| OT-001407 | 140 | | 131 | 86 | 276 | 113 | 52 | 70 |
| OT-002158 - | 1 | 1 | 1 | 2 | 42 | 76 | 46 | 68 |
| Vehicle | | | | | | | | |
| OT-002158 - | 278 | 240 | 109 | 168 | 71 | 1286 | 137 | 78 |
| BZA | | | | | | | | |

[0523] Mice infused with OT-002158 expressing T cells demonstrated an increase in both total T cell and CAR+ cell counts in the cohorts treated with Bazedoxifene compared to vehicle control suggesting a CAR mediated cell expansion that correlates with a decrease in tumor burden. Mice infused with OT-001407 construct, but not vector control, showed similar increases in T cell and CAR+ cell counts, along with decreased tumor burden.

[0524] While the present disclosure has been described at some length and with some particularity with respect to the several described embodiments, it is not intended that it should be limited to any such particulars or embodiments or any particular embodiment, but it is to be construed with references to the appended claims so as to provide the broadest possible interpretation of such claims in view of the prior art and, therefore, to effectively encompass the intended scope of the disclosure.

[0525] All publications, patent applications, patents, and other references mentioned herein are incorporated by reference in their entirety. In case of conflict, the present specification, including definitions, will control. In addition, section headings, the materials, methods, and examples are illustrative only and not intended to be limiting.

1. A composition comprising at least one effector module, said at least one effector module comprising
(a) a stimulus response element (SRE) and
(b) at least one payload, said at least one payload comprising a protein of interest which is attached, appended or associated with said SRE,
wherein said SRE comprises a destabilizing domain (DD), said DD comprising, in whole or in part, the human estrogen receptor (ER; SEQ ID NO. 1).

2. The composition of claim 1, wherein the DD comprises a ligand binding domain of ER (SEQ ID NO. 1), said ligand binding domain comprising amino acids 305 to 509 of ER (SEQ ID NO. 2).

3. The composition of claim 2, wherein the DD comprises at least one mutation, said at least one mutation occurring at position 413 (N413) relative to SEQ ID NO. 1.

4. The composition of claim 3, wherein said mutation is selected from the group consisting of N413D, N413T, N413H, N413A, N413Q, N413V, N413C, N413K, N413M, N413R, N413S, N413W, N413I, N413E, N413L, N413P, N413F, N413Y, and N413G.

5. The composition of claim 4, wherein the mutation is N413D.

6. The composition of claim 4, wherein the mutation is N413T.

7. The composition of claim 2, wherein the DD comprises at least one mutation, said at least one mutation occurring at position 502 (Q502), relative to SEQ ID NO. 1.

8. The composition of claim 7, wherein said mutation is selected from the group consisting of Q502H, Q502D, Q502E, Q502V, Q502A, Q502T, Q502N, Q502K, Q5025, Q502L, Q502Y, Q502W, Q502F, Q502I, Q502G, Q502P, Q502M, and Q502C.

9. The composition of claim 8, wherein the mutation is Q502R.

10. The composition of claim 2, wherein the DD comprises at least two mutations, said at least two mutations occurring at position 413 (N413) and at position 502 (Q502), relative to SEQ ID NO. 1.

11. The composition of claim 10, wherein the mutation occurring at position 413 (N413) is selected from the group consisting of N413D, N413T, N413H, N413A, N413Q, N413V, N413C, N413K, N413M, N413R, N413S, N413W, N413I, N413E, N413L, N413P, N413F, N413Y, and N413G, and wherein the mutation occurring at position at position 502 (Q502) is selected from the group consisting of Q502H, Q502D, Q502E, Q502V, Q502A, Q502T, Q502N, Q502K, Q5025, Q502L, Q502Y, Q502W, Q502F, Q502I, Q502G, Q502P, Q502M, and Q502C.

12. The composition of claim 11, wherein the at least two mutations are N413D and Q502H.

13. The composition of claim 11, wherein the at least two mutations are N413T and Q502H.

14. The composition of any of claims 3-13, wherein the DD further comprises one or more mutations independently selected from L384M, M421G, G521R, or Y537S.

15. The composition of claim 14, wherein the DD is selected from the group consisting of ER (aa 305-549 of WT, L384M, N413F, M421G, G521R, Y537S) (SEQ ID NO. 27), ER (aa 305-549 of WT, L384M, N413L, M421G, G521R, Y537S) (SEQ ID NO. 29), ER (aa 305-549 of WT, L384M, N413Y, M421G, G521R, Y537S) (SEQ ID NO. 31), ER (aa 305-549 of WT, L384M, N413H, M421G, G521R, Y537S) (SEQ ID NO. 33), ER (aa 305-549 of WT, L384M, N413Q, M421G, G521R, Y537S) (SEQ ID NO. 35), ER (aa 305-549 of WT, L384M, N413I, M421G, G521R, Y537S) (SEQ ID NO. 37), ER (aa 305-549 of WT, L384M, N413M, M421G, G521R, Y537S) (SEQ ID NO. 39), ER (aa 305-549 of WT, L384M, N413K, M421G, G521R, Y537S) (SEQ ID NO. 41), ER (aa 305-549 of WT, L384M, N413V, M421G, G521R, Y537S) (SEQ ID NO. 43), ER (aa 305-549 of WT, L384M, N413S, M421G, G521R, Y537S) (SEQ ID NO. 45), ER (aa 305-549 of WT, L384M, N413C, M421G, G521R, Y537S) (SEQ ID NO. 47), ER (aa 305-549 of WT, L384M, N413W, M421G, G521R, Y537S) (SEQ ID NO. 49), ER (aa 305-549 of WT, L384M, N413P, M421G, G521R, Y537S) (SEQ ID NO. 51), ER (aa 305-549 of WT, L384M, N413R, M421G, G521R, Y537S) (SEQ ID NO. 53), ER (aa 305-549 of WT, L384M, N413T, M421G, G521R, Y537S) (SEQ ID NO. 55), ER (aa 305-549 of WT, L384M, N413A, M421G, G521R, Y537S) (SEQ ID NO. 57), ER (aa 305-549 of WT, L384M, N413E, M421G, G521R, Y537S) (SEQ ID NO. 59), ER (aa 305-549 of WT, L384M, N413G, M421G, G521R, Y537S) (SEQ ID NO. 61), ER (aa 305-549 of WT, L384M, M421G, Q502F, G521R, Y537S) (SEQ ID NO. 63), ER (aa 305-549 of WT, L384M, M421G, Q502L, G521R, Y537S) (SEQ ID NO. 65), ER (aa 305-549 of WT, L384M, M421G, Q502Y, G521R, Y537S) (SEQ ID NO. 67), ER (aa 305-549 of WT, L384M, M421G, Q502H, G521R, Y537S) (SEQ ID NO. 69), ER (aa 305-549 of WT, L384M, M421G, Q502I, G521R, Y537S) (SEQ ID NO. 71), ER (aa 305-549 of WT, L384M, M421G, Q502M, G521R, Y537S) (SEQ ID NO. 73), ER (aa 305-549 of WT, L384M, M421G, Q502N, G521R, Y537S) (SEQ ID NO. 75), ER (aa 305-549 of WT, L384M, M421G, Q502K, G521R, Y537S) (SEQ ID NO. 77), ER (aa 305-549 of WT, L384M, M421G, Q502V, G521R, Y537S) (SEQ ID NO. 79), ER (aa 305-549 of WT, L384M, M421G, Q5025, G521R, Y537S) (SEQ ID NO. 81), ER (aa 305-549 of WT, L384M, M421G, Q502C, G521R, Y537S) (SEQ ID NO. 83), ER (aa 305-549 of WT, L384M, M421G, Q502W, G521R, Y537S) (SEQ ID NO. 85), ER (aa 305-549 of WT, L384M, M421G, Q502P, G521R, Y537S) (SEQ ID NO. 87), ER (aa 305-549 of WT, L384M, M421G, Q502T, G521R, Y537S) (SEQ ID NO. 89), ER (aa 305-549 of WT, L384M, M421G, Q502A, G521R, Y537S) (SEQ ID NO. 91), ER (aa 305-549 of WT, L384M, M421G, Q502D, G521R, Y537S) (SEQ ID NO. 93), ER (aa 305-549 of WT, L384M, M421G, Q502E, G521R, Y537S) (SEQ ID NO. 95), and ER (aa 305-549 of WT, L384M, M421G, Q502G, G521R, Y537S) (SEQ ID NO. 97).

16. The composition of claim 1, wherein the at least one payload is a natural protein or a variant thereof or a fusion polypeptide, or an antibody or a fragment thereof or a therapeutic agent or a gene therapy.

17. The composition of claim 16, wherein the payload is therapeutic agent, said therapeutic agent is selected from a cytokine, a cytokine-cytokine receptor fusion protein, a chimeric antigen receptor (CAR) or a combination thereof.

18. The composition of claim 17, wherein the payload is a cytokine, said cytokine comprising IL15.

19. The composition of claim 18, wherein the IL15 comprises amino acid 49-162 of wild-type (SEQ ID NO. 246).

20. The composition of claim 17, wherein the payload is a cytokine-cytokine receptor fusion, said cytokine-cytokine receptor fusion comprises IL15 appended to an IL15 Receptor alpha subunit (IL15Ra), and where the IL15 comprises amino acid 49-162 of wild-type (SEQ ID NO. 246) and the IL15Ra comprises amino acid 31-267 of wild-type (SEQ ID NO. 248).

21. The composition of claim 17, wherein the payload is a cytokine, said cytokine comprising IL12.

22. The composition of claim 21, wherein the IL12 comprises a p40 subunit of SEQ ID NO. 111, appended to a p35 subunit of SEQ ID NO. 113.

23. The composition of claim 22, wherein the effector module comprises the amino acid sequence selected from the group consisting of SEQ ID NO. 232, 208, 158-217, 219-231, and SEQ ID NO. 233-242.

24. The composition of claim 23, wherein the effector module comprises the amino acid sequence of SEQ ID NO. 232.

25. The composition of claim 23, wherein the effector module comprises the amino acid sequence of SEQ ID NO. 208.

26. The composition of claim 16, wherein the payload is a chimeric antigen receptor (CAR).

27. The composition of claim 26, wherein the CAR comprises a CD19 scFv.

28. The composition of claim 27, wherein the CD19 scFv amino acid sequence is selected from the group consisting of SEQ ID NO. 103 and SEQ ID NO. 368.

29. The composition of claim 27, further comprising at least one domain selected from the group consisting of CD8 hinge and transmembrane domain, 4-1BB intracellular signaling domain and CD8 zeta signaling domain.

30. The composition of claim 29, wherein the domain is CD8 hinge and transmembrane domain, and wherein the CD8 hinge and transmembrane domain comprises the amino acid sequence of SEQ ID NO. 105.

31. The composition of claim 29, wherein the domain is 4-1BB intracellular signaling domain, and wherein the 4-1BB intracellular signaling domain comprises the amino acid sequence of SEQ ID NO. 107.

32. The composition of claim 29, wherein the domain is CD8 zeta signaling domain, and wherein the CD8 zeta signaling domain comprises the amino acid sequence of SEQ ID NO. 109.

33. The composition of claim 17, wherein the payload is a cytokine and a CAR.

34. The composition of claim 33, wherein the CAR comprises a CD19 scFv and wherein the cytokine is IL12.

35. The composition of claim 1, wherein the SRE is responsive to one or more stimuli.

36. The composition of claim 35, wherein the stimulus is a small molecule, wherein the small molecule is selected from bazedoxifene, raloxifene 4-hydroxytamoxifen (4-OHT), fulvestrant, oremifene, lasofoxifene, clomifene, femarelle and ormeloxifene.

37. The composition of claim 36, wherein the small molecule is bazedoxifene.

38. The composition of claim 36, wherein the small molecule is raloxifene.

39. A composition comprising at least one effector module, said at least one effector module comprising
(a) a stimulus response element (SRE) and
(b) at least one payload, said at least one payload, said payload comprising a chimeric antigen receptor, a cytokine or a cytokine-cytokine receptor fusion protein, wherein said SRE comprises a destabilizing domain (DD), said DD comprising,
(i) a region of human estrogen receptor (ER) of SEQ ID NO. 1; and
(ii) one or more mutations selected from T371A, N5195, K303R, N3045, 5305N, R335G, T431I, E523G, A546T, and G442V relative to SEQ ID NO. 1.

40. The composition of claim 39, wherein the DD further comprises one or more mutations independently selected from the group consisting of L384M, M421G, G521R, or Y537S.

41. The composition of any of claim 39 or 40, wherein the DD is ER (aa 305-549 of WT, L384M, N413D, M421G, G521R, Y537S) (SEQ ID NO. 19), ER (aa 305-549 of WT, L384M, N413T, M421G, G521R, Y537S) (SEQ ID NO. 55), ER (aa 305-549 of WT, L384M, M421G, Q502H, G521R, Y537S) (SEQ ID NO. 69), ER (aa 305-549 of WT, T371A, L384M, M421G, N5195, G521R, Y537S) (SEQ ID NO. 8), ER (aa 303-549 of WT, K303R, N3045, T371A, L384M, M421G, N5195, G521R, Y537S) (SEQ ID NO. 12), ER (aa 305-549 of WT, R335G, L384M, M421G, N5195, G521R, Y537S) (SEQ ID NO. 13), ER (aa 305-549 of WT, R335G, L384M, M421G, G521R, E523G, Y537S, A546T) (SEQ ID NO. 15), ER (aa 305-549 of WT, L384M, M421G, T431I, G521R, Y537S) (SEQ ID NO. 17), ER (aa 305-549 of WT, L384M, M421G, N5195, G521R, Y537S) (SEQ ID NO. 21), ER (aa 305-549 of WT, L384M, M421G, Q502R, G521R, Y537S) (SEQ ID NO. 23), ER (aa 305-549 of WT, 5305N, L384M, M421G, G442V, G521R, Y537S) (SEQ ID NO. 25), ER (aa 305-549 of WT, L384M, M421G, G521R, Y537S) (SEQ ID NO. 4).

42. The composition of claim 41, wherein the DD is ER (aa 305-549 of WT, L384M, N413D, M421G, G521R, Y537S) (SEQ ID NO. 19).

43. The composition of claim 41, wherein the DD is ER (aa 305-549 of WT, L384M, N413T, M421G, G521R, Y537S) (SEQ ID NO. 55).

44. The composition of claim 41, wherein the DD is ER (aa 305-549 of WT, L384M, M421G, Q502H, G521R, Y537S) (SEQ ID NO. 69).

45. The composition of claim 41, wherein the DD is ER (aa 305-549 of WT, T371A, L384M, M421G, N519S, G521R, Y537S) (SEQ ID NO. 8).

46. The composition of claim 39, wherein the payload is a chimeric antigen receptor, and said chimeric antigen receptor comprises
(a) an extracellular target moiety;
(b) a hinge and transmembrane domain;
(c) an intracellular signaling domain; and
(d) optionally, one or more co-stimulatory domains.

47. The composition of claim 46, wherein the extracellular target of the CAR moiety has an affinity or binds to a target molecule on the surface of a cancer cell.

48. The composition of claim 47, wherein the extracellular target moiety of the CAR is an scFv.

49. The composition of claim 47, wherein the target molecule is CD19.

50. The composition of claim 48 or claim 49, wherein the extracellular target moiety of the CAR is a CD19 scFv (SEQ ID NO. 103; or SEQ ID NO. 368).

51. The composition of claim 46, wherein the hinge and transmembrane domain of the CAR are paired and wherein the paired hinge and transmembrane domain is derived from any of the members of the group consisting of:
(a) a molecule selected from CD8a, CD5, CD4, CD9, CD16, CD22, CD33, CD28, CD37, CD45, CD64, CD80, CD86, CD148, DAP 10, EpoRI, GITR, LAG3, ICOS, Her2, OX40 (CD134), 4-1BB (CD137), CD152, CD154, PD-1, or CTLA-4;
(b) the CD3 epsilon chain of a T-cell receptor;
(c) a transmembrane region of an alpha, beta or zeta chain of a T-cell receptor; and
(d) an immunoglobulin selected from IgG1, IgD, IgG4, and an IgG4 Fc region.

52. The composition of claim 51, wherein the paired hinge and transmembrane domain of the CAR is derived from CD8a and said paired hinge and transmembrane domain comprises the amino acid sequence of SEQ ID NO. 105.

53. The composition of claim 46, wherein
(a) the intracellular signaling domain of the CAR is the signaling domain derived from CD3zeta or a cell surface molecule selected from the group consisting of FcR gamma, FcR beta, CD3 gamma, CD3 delta, CD3 epsilon, CD5, CD22, CD79a, CD79b, and CD66d; and
(b) the co-stimulatory domain is present and is derived from the group consisting of 4-1BB (CD137) 2B4, HVEM, ICOS, LAG3, DAP10, DAP12, CD27, CD28, OX40 (CD134), CD30, CD40, ICOS (CD278), glucocorticoid-induced tumor necrosis factor receptor (GITR), lymphocyte function-associated antigen-1 (LFA-1), CD2, CD7, LIGHT, NKG2C, and B7-H3.

54. The composition of claim 46, wherein the intracellular signaling domain of the CAR is derived from CD3 zeta and said intracellular signaling domain comprises the amino acid sequence of SEQ ID NO. 109.

55. The composition of claim 46, wherein the co-stimulatory domain of the CAR is present, said co-stimulatory domain being derived from 4-1BB, wherein the costimulatory domain comprises the amino acid sequence of SEQ ID NO. 107.

56. The composition of claim 46, wherein the chimeric antigen receptor further comprises a signal sequence.

57. The composition of claim 56, wherein the signal sequence is derived from CD8a and wherein the signal sequence comprises the amino acid sequence of SEQ ID NO. 99.

58. The composition of any of claims 46-57, wherein the effector module comprises the amino acid sequence selected from the group consisting of SEQ ID NO. 412, 410, 418, 414, 416, 420, 422, 394, 398, 388, 390, 392, 396, 400, 402, 404, and 406.

59. The composition of claim 58, wherein the effector module comprises the amino acid sequence of SEQ ID NO. 412.

60. The composition of claim 58, wherein the effector module comprises the amino acid sequence of SEQ ID NO. 410.

61. The composition of claim 58, wherein the effector module comprises the amino acid sequence of SEQ ID NO. 414.

62. The composition of claim 58, wherein the effector module comprises the amino acid sequence of SEQ ID NO. 418.

63. The composition of claim 46, wherein the payload is a cytokine.

64. The composition of claim 63, wherein the cytokine is IL12.

65. The composition of claim 64, wherein the IL12 comprises a p40 subunit of SEQ ID NO. 111, appended to a p35 subunit of SEQ ID NO. 113.

66. The composition of claim 65, wherein the effector module comprises an amino acid sequence selected from the group consisting of SEQ ID NO. 240, 160, 242, 130, 133, 136, 139, 142, 145, 148, 151, 154, and 382.

67. The composition of claim 66, wherein the effector module comprises the amino acid sequence of SEQ ID NO. 240.

68. The composition of claim 66, wherein the effector module comprises the amino acid sequence of SEQ ID NO. 160.

69. The composition of claim 66, wherein the effector module comprises the amino acid sequence of SEQ ID NO. 242.

70. The composition of any of claims 63-69, further comprising a chimeric antigen receptor.

71. The composition of claim 70, wherein the CAR is a CD19 CAR.

72. The composition of any of claim 71, where the composition comprises an amino acid sequence selected from SEQ ID NO. 156, 373, 426, 375, 377, and 384.

73. The composition of claim 72 comprising SEQ ID NO. 156.

74. The composition of claim 72, comprising SEQ ID NO. 373.

75. The composition of claim 72, comprising SEQ ID NO. 426.

76. The composition of claim 39, wherein the payload is a cytokine-cytokine receptor fusion protein.

77. The composition of claim 76, wherein the cytokine-cytokine receptor fusion protein comprises the whole or a portion of IL15, fused to the whole or a portion of IL15Ra to produce a IL15-IL15Ra fusion protein.

78. The composition of claim 76, wherein the cytokine-cytokine receptor fusion protein comprises the amino acid sequence of SEQ ID NO. 246 and the amino acid sequence of SEQ ID NO. 248.

79. The composition of any one of claims 76-78, wherein the effector module comprises the amino acid sequence selected from the group consisting of SEQ ID NO. 252, 256, 268, 254, 258, 260, 262, 264, and 266.

80. The composition of claim 79, comprising SEQ ID NO. 252.

81. The composition of claim 79, comprising SEQ ID NO. 256.

82. The composition of claim 79, comprising SEQ ID NO. 268.

83. The composition of any of claims 39-82, wherein the SRE is responsive to one or more stimuli.

84. The composition of claim 83, wherein the stimulus is a small molecule, wherein the small molecule is selected from bazedoxifene, raloxifene 4-hydroxytamoxifen (4-OHT), fulvestrant, oremifene, lasofoxifene, clomifene, femarelle and ormeloxifene.

85. The composition of claim 84, wherein the small molecule is bazedoxifene.

86. The composition of claim 84, wherein the small molecule is raloxifene.

87. A polynucleotide encoding any of the compositions of claims 1-86.

88. A vector comprising a polynucleotide of claim 87.

89. A pharmaceutical composition comprising the composition of any one of claims 1-86 and a pharmaceutically acceptable excipient.

90. An immune cell for adoptive cell transfer (ACT) which expresses the compositions of any of claims 1-86, the pharmaceutical composition of claim 89, the polynucleotide of claim 87 and/or is transduced or transfected with the vector of claim 88.

The application's sequence listing, which the Patent Office published only in electronic form, follows.

SEQUENCE LISTING (427 sequences)

SEQ ID NO: 1 - protein, 595 aa, Homo sapiens [sequence omitted]

SEQ ID NO: 2 - protein, 245 aa, Artificial Sequence
  Description of Artificial Sequence: Synthetic Destabilizing Domain (DD)
SLALSLTADQMVSALLDAEPPILYSEYDPTRPFSEASMMGLLTNLADRELVHMINWAKRVPGFVDLTLHDQVHLLECAWLEILMIGLVWRSMEHPGKLLFAPNLLLDRNQGKCVEGMVEIFDMLLATSSRFRMMNLQGEEFVCLKSIILLNSGVYTFLSSTLKSLEEKDHIHRVLDKITDTLIHLMAKAGLTLQQQHQRLAQLLLILSHIRHMSNKGMEHLYSMKCKNVVPLYDLLLEMLDAHRL

SEQ ID NO: 3 - DNA, 735 bp, Artificial Sequence
  Description of Artificial Sequence: Synthetic Destabilizing Domain (DD)
tcgttggcactttccctgactgccgaccagatggtgtccgcccttctggacgccgagcctccaattctgtactcggagtacgatccgactcgcccgttctccgaagccagcatgatgggcctgttgactaacctggcggaccgcgagttggtgcacatgattaactgggctaagcgggtgccgggcttcgtggacctgactctgcacgaccaagtgcacctcctggaatgcgcctggctggaaatcctcatgatcggcctcgtgtggagatccatggagcatcccggaaagctcctgtttgcacccaacctcctgcttgatcgcaaccagggaaaatgcgtggaagggatggtcgagattttcgacatgctgctcgccacctcttcccggttccggatgatgaatctgcagggagaagagttcgtgtgtctgaagtcaatcatcctgctgaactccggggtctataccttcctgagctcgaccctcaagtcactggaggaaaaagaccacatccatcgcgtgctcgataagatcaccgacacccttatccatctcatggcgaaggctggactgaccctgcaacagcagcaccagaggctggcccagttgctgctgattctgagccacatccggcacatgtcgaacaaggggatggaacacctgtacagcatgaagtgcaagaacgtcgtgcctctgtacgatctgctcctggaaatgctggacgcgcacagactc

SEQ ID NO: 4 - protein, 245 aa, Artificial Sequence
  Description of Artificial Sequence: Synthetic Destabilizing Domain (DD)
SLALSLTADQMVSALLDAEPPILYSEYDPTRPFSEASMMGLLTNLADRELVHMINWAKRVPGFVDLTLHDQVHLLECAWMEILMIGLVWRSMEHPGKLLFAPNLLLDRNQGKCVEGGVEIFDMLLATSSRFRMMNLQGEEFVCLKSIILLNSGVYTFLSSTLKSLEEKDHIHRVLDKITDTLIHLMAKAGLTLQQQHQRLAQLLLILSHIRHMSNKRMEHLYSMKCKNVVPLSDLLLEMLDAHRL

SEQ ID NO: 5 - DNA, 735 bp, Artificial Sequence
  Description of Artificial Sequence: Synthetic Destabilizing Domain (DD)
tcgttggcactttccctgactgccgaccagatggtgtccgcccttctggacgccgagcctccaattctgtactcggagtacgatccgactcgcccgttctccgaagccagcatgatgggcctgttgactaacctggcggaccgcgagttggtgcacatgattaactgggctaagcgggtgccgggcttcgtggacctgaccctgcacgaccaagtgcacctcctggaatgcgcctggatggaaatcctcatgatcggcctcgtgtggagatccatggagcatcccggaaagctcctgtttgcacccaacctcctgcttgatcgcaaccagggaaaatgcgtggaagggggtgtcgagattttcgacatgctgctcgccacctcttcccggttccggatgatgaatctgcagggagaagagttcgtgtgtctgaagtcaatcatcctgctgaactccggggtctataccttcctgagctcgaccctcaagtcactggaggaaaaagaccacatccatcgcgtgctcgataagatcaccgacacccttatccatctcatggcgaaggctggactgaccctgcaacagcagcaccagaggctggcccagttgctgctgattctgagccacatccggcacatgtcgaacaagaggatggaacacctgtacagcatgaagtgcaagaacgtcgtgcctctgtccgatctgctcctggaaatgctggacgcgcacagactc

SEQ ID NO: 6 - DNA, 735 bp, Artificial Sequence
  Description of Artificial Sequence: Synthetic Destabilizing Domain (DD)
tcactggcgctcagccttactgccgaccaaatggtatcagctcttctggacgcagaacccccaattctttattccgagtacgaccccacacgcccgttcagtgaagcttccatgatgggcctccttacgaaccttgccgaccgggaactcgtgcacatgatcaattgggcgaagcgggtgccggggttcgtagatttgacacttcacgaccaagttcatctcttggaatgtgcttggatggagatattgatgatcggactcgtgtggaggtcaatggagcatcctggtaaacttcttttcgcacccaatctgctcttggatagaaatcagggtaagtgcgtcgagggtggcgttgaaatcttcgacatgctccttgcgacatccagccgattccgaatgatgaatcttcaaggagaggaatttgtctgtcttaagagcattatactcctcaatagtggagtttacaccttcttgtcctctacactgaaatcacttgaggaaaaagatcacatacatagggtgttggataaaatcacggatacactcatacatctgatggcaaaagcaggattgaccctgcaacagcagcaccagcgactggcccaactgctgttgatccttagccatatcagacacatgtctaacaaaaggatggaacatttgtacagcatgaaatgtaagaacgtagtgccactgtccgatttgttgctggaaatgctggacgctcatcggctc

SEQ ID NO: 7 - DNA, 735 bp, Artificial Sequence
  Description of Artificial Sequence: Synthetic Destabilizing Domain (DD)
tcactggcgctcagccttactgccgaccaaatggtatcagctcttctggacgcagaacccccaattctttattccgagtacgaccccacacgcccgttcagtgaagcttccatgatgggcctccttacgaaccttgccgaccgggaactcgtgcacatgatcaattgggcgaagcgggtgccggggttcgtagatttgacacttcacgaccaagttcatctcttggaatgtgcttggatggagatattgatgatcggactcgtgtggaggtcaatggagcatcctggtaaacttcttttcgcacccaatctgctcttggatagaaatcagggtaagtgcgtcgagggtggcgttgaaatcttcgacatgctccttgcgacatccagccgattccgaatgatgaatcttcaaggagaggaatttgtctgtcttaagagcattatactcctcaatagtggagtttacaccttcttgtcctctacactgaaatcacttgaggaaaaagatcacatacatagggtgttggataaaatcacggatacactcatacatctgatggcaaaagcaggattgaccctgcaacagcagcaccaacgactggcccaactgctgttgatccttagccatatcagacacatgtctaacaaaaggatggaacatttgtacagcatgaaatgtaagaacgtagtgccactgtccgatttgttgctggaaatgctggacgctcatcggctc

SEQ ID NO: 8 - protein, 245 aa, Artificial Sequence
  Description of Artificial Sequence: Synthetic Destabilizing Domain (DD)
SLALSLTADQMVSALLDAEPPILYSEYDPTRPFSEASMMGLLTNLADRELVHMINWAKRVPGFVDLALHDQVHLLECAWMEILMIGLVWRSMEHPGKLLFAPNLLLDRNQGKCVEGGVEIFDMLLATSSRFRMMNLQGEEFVCLKSIILLNSGVYTFLSSTLKSLEEKDHIHRVLDKITDTLIHLMAKAGLTLQQQHQRLAQLLLILSHIRHMSSKRMEHLYSMKCKNVVPLSDLLLEMLDAHRL

SEQ ID NO: 9 - DNA, 735 bp, Artificial Sequence
  Description of Artificial Sequence: Synthetic Destabilizing Domain (DD)
tcgttggcactttccctgactgccgaccagatggtgtccgcccttctggacgccgagcctccaattctgtactcggagtacgatccgactcgcccgttctccgaagccagcatgatgggcctgttgactaacctggcggaccgcgagttggtgcacatgattaactgggctaagcgggtgccgggcttcgtggacctggccctgcacgaccaagtgcacctcctggaatgcgcctggatggaaatcctcatgatcggcctcgtgtggagatccatggagcatcccggaaagctcctgtttgcacccaacctcctgcttgatcgcaaccagggaaaatgcgtggaagggggtgtcgagattttcgacatgctgctcgccacctcttcccggttccggatgatgaatctgcagggagaagagttcgtgtgtctgaagtcaatcatcctgctgaactccggggtctataccttcctgagctcgaccctcaagtcactggaggaaaaagaccacatccatcgcgtgctcgataagatcaccgacacccttatccatctcatggcgaaggctggactgaccctgcaacagcagcaccagaggctggcccagttgctgctgattctgagccacatccggcacatgtcgtccaagaggatggaacacctgtacagcatgaagtgcaagaacgtcgtgcctctgtccgatctgctcctggaaatgctggacgcgcacagactc

SEQ ID NO: 10 - DNA, 735 bp, Artificial Sequence
  Description of Artificial Sequence: Synthetic Destabilizing Domain (DD)
tcactggcgctcagccttactgccgaccaaatggtatcagctcttctggacgcagaacccccaattctttattccgagtacgaccccacacgcccgttcagtgaagcttccatgatgggcctccttacgaaccttgccgaccgggaactcgtgcacatgatcaattgggcgaagcgggtgccggggttcgtagatttggcacttcacgaccaagttcatctcttggaatgtgcttggatggagatattgatgatcggactcgtgtggaggtcaatggagcatcctggtaaacttcttttcgcacccaatctgctcttggatagaaatcagggtaagtgcgtcgagggtggcgttgaaatcttcgacatgctccttgcgacatccagccgattccgaatgatgaatcttcaaggagaggaatttgtctgtcttaagagcattatactcctcaatagtggagtttacaccttcttgtcctctacactgaaatcacttgaggaaaaagatcacatacatagggtgttggataaaatcacggatacactcatacatctgatggcaaaagcaggattgaccctgcaacagcagcaccaacgactggcccaactgctgttgatccttagccatatcagacacatgtctagcaaaaggatggaacatttgtacagcatgaaatgtaagaacgtagtgccactgtccgatttgttgctggaaatgctggacgctcatcggctc

SEQ ID NO: 11 - DNA, 735 bp, Artificial Sequence
  Description of Artificial Sequence: Synthetic Destabilizing Domain (DD)
tcactggcgctcagccttactgccgaccaaatggtatcagctcttctggacgcagaacccccaattctttattccgagtacgaccccacacgcccgttcagtgaagcttccatgatgggcctccttacgaaccttgccgaccgggaactcgtgcacatgatcaattgggcgaagcgggtgccggggttcgtagatttggcacttcacgaccaagttcatctcttggaatgtgcttggatggagatattgatgatcggactcgtgtggaggtcaatggagcatcctggtaaacttcttttcgcacccaatctgctcttggatagaaatcagggtaagtgcgtcgagggtggcgttgaaatcttcgacatgctccttgcgacatccagccgattccgaatgatgaatcttcaaggagaggaatttgtctgtcttaagagcattatactcctcaatagtggagtttacaccttcttgtcctctacactgaaatcacttgaggaaaaagatcacatacatagggtgttggataaaatcacggatacactcatacatctgatggcaaaagcaggattgaccctgcaacagcagcatcaacgactggcccaactgctgttgatccttagccatatcagacacatgtctagcaaaaggatggaacatttgtacagcatgaaatgtaagaacgtagtgccactgtccgatttgttgctggaaatgctggacgctcatcggctc

SEQ ID NO: 12 - protein, 247 aa, Artificial Sequence
  Description of Artificial Sequence: Synthetic Destabilizing Domain (DD)
RSSLALSLTADQMVSALLDAEPPILYSEYDPTRPFSEASMMGLLTNLADRELVHMINWAKRVPGFVDLALHDQVHLLECAWMEILMIGLVWRSMEHPGKLLFAPNLLLDRNQGKCVEGGVEIFDMLLATSSRFRMMNLQGEEFVCLKSIILLNSGVYTFLSSTLKSLEEKDHIHRVLDKITDTLIHLMAKAGLTLQQQHQRLAQLLLILSHIRHMSSKRMEHLYSMKCKNVVPLSDLLLEMLDAHRL

SEQ ID NO: 13 - protein, 245 aa, Artificial Sequence
  Description of Artificial Sequence: Synthetic Destabilizing Domain (DD)
SLALSLTADQMVSALLDAEPPILYSEYDPTGPFSEASMMGLLTNLADRELVHMINWAKRVPGFVDLTLHDQVHLLECAWMEILMIGLVWRSMEHPGKLLFAPNLLLDRNQGKCVEGGVEIFDMLLATSSRFRMMNLQGEEFVCLKSIILLNSGVYTFLSSTLKSLEEKDHIHRVLDKITDTLIHLMAKAGLTLQQQHQRLAQLLLILSHIRHMSSKRMEHLYSMKCKNVVPLSDLLLEMLDAHRL

SEQ ID NO: 14 - DNA, 735 bp, Artificial Sequence
  Description of Artificial Sequence: Synthetic Destabilizing Domain (DD)
tcactggcgctcagccttactgccgaccaaatggtatcagctcttctggacgcagaacccccaattctttattccgagtacgaccccacaggcccgttcagtgaagcttccatgatgggcctccttacgaaccttgccgaccgggaactcgtgcacatgatcaattgggcgaagcgggtgccggggttcgtagatttgacacttcacgaccaagttcatctcttggaatgtgcttggatggagatattgatgatcggactcgtgtggaggtcaatggagcatcctggtaaacttcttttcgcacccaatctgctcttggatagaaatcagggtaagtgcgtcgagggtggcgttgaaatcttcgacatgctccttgcgacatccagccgattccgaatgatgaatcttcaaggagaggaatttgtctgtcttaagagcattatactcctcaatagtggagtttacaccttcttgtcctctacactgaaatcacttgaggaaaaagatcacatacatagggtgttggataaaatcacggatacactcatacatctgatggcaaaagcaggattgaccctgcaacagcagcaccaacgactggcccaactgctgttgatccttagccatatcagacacatgtctagcaaaaggatggaacatttgtacagcatgaaatgtaagaacgtagtgccactgtccgatttgttgctggaaatgctggacgctcatcggctc

SEQ ID NO: 15 - protein, 245 aa, Artificial Sequence
  Description of Artificial Sequence: Synthetic Destabilizing Domain (DD)
SLALSLTADQMVSALLDAEPPILYSEYDPTGPFSEASMMGLLTNLADRELVHMINWAKRVPGFVDLTLHDQVHLLECAWMEILMIGLVWRSMEHPGKLLFAPNLLLDRNQGKCVEGGVEIFDMLLATSSRFRMMNLQGEEFVCLKSIILLNSGVYTFLSSTLKSLEEKDHIHRVLDKITDTLIHLMAKAGLTLQQQHQRLAQLLLILSHIRHMSNKRMGHLYSMKCKNVVPLSDLLLEMLDTHRL

SEQ ID NO: 16 - DNA, 735 bp, Artificial Sequence
  Description of Artificial Sequence: Synthetic Destabilizing Domain (DD)
tcactggcgctcagccttactgccgaccaaatggtatcagctcttctggacgcagaacccccaattctttattccgagtacgaccccacaggcccgttcagtgaagcttccatgatgggcctccttacgaaccttgccgaccgggaactcgtgcacatgatcaattgggcgaagcgggtgccggggttcgtagatttgacacttcacgaccaagttcatctcttggaatgtgcttggatggagatattgatgatcggactcgtgtggaggtcaatggagcatcctggtaaacttcttttcgcacccaatctgctcttggatagaaatcagggtaagtgcgtcgagggtggcgttgaaatcttcgacatgctccttgcgacatccagccgattccgaatgatgaatcttcaaggagaggaatttgtctgtcttaagagcattatactcctcaatagtggagtttacaccttcttgtcctctacactgaaatcacttgaggaaaaagatcacatacatagggtgttggataaaatcacggatacactcatacatctgatggcaaaagcaggattgaccctgcaacagcagcaccaacgactggcccaactgctgttgatccttagccatatcagacacatgtctaacaaaaggatgggacatttgtacagcatgaaatgtaagaacgtagtgccactgtccgatttgttgctggaaatgctggacactcatcggctc

SEQ ID NO: 17 - protein, 245 aa, Artificial Sequence
  Description of Artificial Sequence: Synthetic Destabilizing Domain (DD)
SLALSLTADQMVSALLDAEPPILYSEYDPTRPFSEASMMGLLTNLADRELVHMINWAKRVPGFVDLTLHDQVHLLECAWMEILMIGLVWRSMEHPGKLLFAPNLLLDRNQGKCVEGGVEIFDMLLAISSRFRMMNLQGEEFVCLKSIILLNSGVYTFLSSTLKSLEEKDHIHRVLDKITDTLIHLMAKAGLTLQQQHQRLAQLLLILSHIRHMSNKRMEHLYSMKCKNVVPLSDLLLEMLDAHRL

SEQ ID NO: 18 - DNA, 735 bp, Artificial Sequence
  Description of Artificial Sequence: Synthetic Destabilizing Domain (DD)
tcactggcgctcagccttactgccgaccaaatggtatcagctcttctggacgcagaacccccaattctttattccgagtacgaccccacacgcccgttcagtgaagcttccatgatgggcctccttacgaaccttgccgaccgggaactcgtgcacatgatcaattgggcgaagcgggtgccggggttcgtagatttgacacttcacgaccaagttcatctcttggaatgtgcttggatggagatattgatgatcggactcgtgtggaggtcaatggagcatcctggtaaacttcttttcgcacccaatctgctcttggatagaaatcagggtaagtgcgtcgagggtggcgttgaaatcttcgacatgctccttgcgatatccagccgattccgaatgatgaatcttcaaggagaggaatttgtctgtcttaagagcattatactcctcaatagtggagtttacaccttcttgtcctctacactgaaatcacttgaggaaaaagatcacatacatagggtgttggataaaatcacggatacactcatacatctgatggcaaaagcaggattgaccctgcaacagcagcaccaacgactggcccaactgctgttgatccttagccatatcagacacatgtctaacaaaaggatggaacatttgtacagcatgaaatgtaagaacgtagtgccactgtccgatttgttgctggaaatgctggacgctcatcggctc

SEQ ID NO: 19 - protein, 245 aa, Artificial Sequence
  Description of Artificial Sequence: Synthetic Destabilizing Domain (DD)
SLALSLTADQMVSALLDAEPPILYSEYDPTRPFSEASMMGLLTNLADRELVHMINWAKRVPGFVDLTLHDQVHLLECAWMEILMIGLVWRSMEHPGKLLFAPNLLLDRDQGKCVEGGVEIFDMLLATSSRFRMMNLQGEEFVCLKSIILLNSGVYTFLSSTLKSLEEKDHIHRVLDKITDTLIHLMAKAGLTLQQQHQRLAQLLLILSHIRHMSNKRMEHLYSMKCKNVVPLSDLLLEMLDAHRL

SEQ ID NO: 20 - DNA, 735 bp, Artificial Sequence
  Description of Artificial Sequence: Synthetic Destabilizing Domain (DD)
tcactggcgctcagccttactgccgaccaaatggtatcagctcttctggacgcagaacccccaattctttattccgagtacgaccccacacgcccgttcagtgaagcttccatgatgggcctccttacgaaccttgccgaccgggaactcgtgcacatgatcaattgggcgaagcgggtgccggggttcgtagatttgacacttcacgaccaagttcatctcttggaatgtgcttggatggagatattgatgatcggactcgtgtggaggtcaatggagcatcctggtaaacttcttttcgcacccaatctgctcttggatagagatcagggtaagtgcgtcgagggtggcgttgaaatcttcgacatgctccttgcgacatccagccgattccgaatgatgaatcttcaaggagaggaatttgtctgtcttaagagcattatactcctcaatagtggagtttacaccttcttgtcctctacactgaaatcacttgaggaaaaagatcacatacatagggtgttggataaaatcacggatacactcatacatctgatggcaaaagcaggattgaccctgcaacagcagcaccaacgactggcccaactgctgttgatccttagccatatcagacacatgtctaacaaaaggatggaacatttgtacagcatgaaatgtaagaacgtagtgccactgtccgatttgttgctggaaatgctggacgctcatcggctc

SEQ ID NO: 21 - protein, 245 aa, Artificial Sequence
  Description of Artificial Sequence: Synthetic Destabilizing Domain (DD)
SLALSLTADQMVSALLDAEPPILYSEYDPTRPFSEASMMGLLTNLADRELVHMINWAKRVPGFVDLTLHDQVHLLECAWMEILMIGLVWRSMEHPGKLLFAPNLLLDRNQGKCVEGGVEIFDMLLATSSRFRMMNLQGEEFVCLKSIILLNSGVYTFLSSTLKSLEEKDHIHRVLDKITDTLIHLMAKAGLTLQQQHQRLAQLLLILSHIRHMSSKRMEHLYSMKCKNVVPLSDLLLEMLDAHRL

SEQ ID NO: 22 - DNA, 735 bp, Artificial Sequence
  Description of Artificial Sequence: Synthetic Destabilizing Domain (DD)
tcactggcgctcagccttactgccgaccaaatggtatcagctcttctggacgcagaacccccaattctttattccgagtacgaccccacacgcccgttcagtgaagcttccatgatgggcctccttacgaaccttgccgaccgggaactcgtgcacatgatcaattgggcgaagcgggtgccggggttcgtagatttgacacttcacgaccaagttcatctcttggaatgtgcttggatggagatattgatgatcggactcgtgtggaggtcaatggagcatcctggtaaacttcttttcgcacccaatctgctcttggatagaaatcagggtaagtgcgtcgagggtggcgttgaaatcttcgacatgctccttgcgacatccagccgattccgaatgatgaatcttcaaggagaggaatttgtctgtcttaagagcattatactcctcaatagtggagtttacaccttcttgtcctctacactgaaatcacttgaggaaaaagatcacatacatagggtgttggataaaatcacggatacactcatacatctgatggcaaaagcaggattgaccctgcaacagcagcaccaacgactggcccaactgctgttgatccttagccatatcagacacatgtctagcaaaaggatggaacatttgtacagcatgaaatgtaagaacgtagtgccactgtccgatttgttgctggaaatgctggacgctcatcggctc

SEQ ID NO: 23 - protein, 245 aa, Artificial Sequence
  Description of Artificial Sequence: Synthetic Destabilizing Domain (DD)
SLALSLTADQMVSALLDAEPPILYSEYDPTRPFSEASMMGLLTNLADRELVHMINWAKRVPGFVDLTLHDQVHLLECAWMEILMIGLVWRSMEHPGKLLFAPNLLLDRNQGKCVEGGVEIFDMLLATSSRFRMMNLQGEEFVCLKSIILLNSGVYTFLSSTLKSLEEKDHIHRVLDKITDTLIHLMAKAGLTLQQQHRRLAQLLLILSHIRHMSNKRMEHLYSMKCKNVVPLSDLLLEMLDAHRL

SEQ ID NO: 24 - DNA, 735 bp, Artificial Sequence
  Description of Artificial Sequence: Synthetic Destabilizing Domain (DD)
tcactggcgctcagccttactgccgaccaaatggtatcagctcttctggacgcagaacccccaattctttattccgagtacgaccccacacgcccgttcagtgaagcttccatgatgggcctccttacgaaccttgccgaccgggaactcgtgcacatgatcaattgggcgaagcgggtgccggggttcgtagatttgacacttcacgaccaagttcatctcttggaatgtgcttggatggagatattgatgatcggactcgtgtggaggtcaatggagcatcctggtaaacttcttttcgcacccaatctgctcttggatagaaatcagggtaagtgcgtcgagggtggcgttgaaatcttcgacatgctccttgcgacatccagccgattccgaatgatgaatcttcaaggagaggaatttgtctgtcttaagagcattatactcctcaatagtggagtttacaccttcttgtcctctacactgaaatcacttgaggaaaaagatcacatacatagggtgttggataaaatcacggatacactcatacatctgatggcaaaagcaggattgaccctgcaacagcagcaccgacgactggcccaactgctgttgatccttagccatatcagacacatgtctaacaaaaggatggaacatttgtacagcatgaaatgtaagaacgtagtgccactgtccgatttgttgctggaaatgctggacgctcatcggctc

SEQ ID NO: 25 - protein, 245 aa, Artificial Sequence
  Description of Artificial Sequence: Synthetic Destabilizing Domain (DD)
NLALSLTADQMVSALLDAEPPILYSEYDPTRPFSEASMMGLLTNLADRELVHMINWAKRVPGFVDLTLHDQVHLLECAWMEILMIGLVWRSMEHPGKLLFAPNLLLDRNQGKCVEGGVEIFDMLLATSSRFRMMNLQVEEFVCLKSIILLNSGVYTFLSSTLKSLEEKDHIHRVLDKITDTLIHLMAKAGLTLQQQHQRLAQLLLILSHIRHMSNKRMEHLYSMKCKNVVPLSDLLLEMLDAHRL

SEQ ID NO: 26 - DNA, 735 bp, Artificial Sequence
  Description of Artificial Sequence: Synthetic Destabilizing Domain (DD)
aatctggcgctcagccttactgccgaccaaatggtatcagctcttctggacgcagaacccccaattctttattccgagtacgaccccacacgcccgttcagtgaagcttccatgatgggcctccttacgaaccttgccgaccgggaactcgtgcacatgatcaattgggcgaagcgggtgccggggttcgtagatttgacacttcacgaccaagttcatctcttggaatgtgcttggatggagatattgatgatcggactcgtgtggaggtcaatggagcatcctggtaaacttcttttcgcacccaatctgctcttggatagaaatcagggtaagtgcgtcgagggtggcgttgaaatcttcgacatgctccttgcgacatccagccgattccgaatgatgaatcttcaagtagaggaatttgtctgtcttaagagcattatactcctcaatagtggagtttacaccttcttgtcctctacactgaaatcacttgaggaaaaagatcacatacatagggtgttggataaaatcacggatacactcatacatctgatggcaaaagcaggattgaccctgcaacagcagcaccaacgactggcccaactgctgttgatccttagccatatcagacacatgtctaacaaaaggatggaacatttgtacagcatgaaatgtaagaacgtagtgccactgtccgatttgttgctggaaatgctggacgctcatcggctc

SEQ ID NO: 27 - protein, 245 aa, Artificial Sequence
  Description of Artificial Sequence: Synthetic Destabilizing Domain (DD)
SLALSLTADQMVSALLDAEPPILYSEYDPTRPFSEASMMGLLTNLADRELVHMINWAKRVPGFVDLTLHDQVHLLECAWMEILMIGLVWRSMEHPGKLLFAPNLLLDRFQGKCVEGGVEIFDMLLATSSRFRMMNLQGEEFVCLKSIILLNSGVYTFLSSTLKSLEEKDHIHRVLDKITDTLIHLMAKAGLTLQQQHQRLAQLLLILSHIRHMSNKRMEHLYSMKCKNVVPLSDLLLEMLDAHRL

SEQ ID NO: 28 - DNA, 735 bp, Artificial Sequence
  Description of Artificial Sequence: Synthetic Destabilizing Domain (DD)
tcactggcgctcagccttactgccgaccaaatggtatcagctcttctggacgcagaacccccaattctttattccgagtacgaccccacacgcccgttcagtgaagcttccatgatgggcctccttacgaaccttgccgaccgggaactcgtgcacatgatcaattgggcgaagcgggtgccggggttcgtagatttgacacttcacgaccaagttcatctcttggaatgtgcttggatggagatattgatgatcggactcgtgtggaggtcaatggagcatcctggtaaacttcttttcgcacccaatctgctcttggatagattccagggtaagtgcgtcgagggtggcgttgaaatcttcgacatgctccttgcgacatccagccgattccgaatgatgaatcttcaaggagaggaatttgtctgtcttaagagcattatactcctcaatagtggagtttacaccttcttgtcctctacactgaaatcacttgaggaaaaagatcacatacatagggtgttggataaaatcacggatacactcatacatctgatggcaaaagcaggattgaccctgcaacagcagcaccaacgactggcccaactgctgttgatccttagccatatcagacacatgtctaacaaaaggatggaacatttgtacagcatgaaatgtaagaacgtagtgccactgtccgatttgttgctggaaatgctggacgctcatcggctc

SEQ ID NO: 29 - protein, 245 aa, Artificial Sequence
  Description of Artificial Sequence: Synthetic Destabilizing Domain (DD)
SLALSLTADQMVSALLDAEPPILYSEYDPTRPFSEASMMGLLTNLADRELVHMINWAKRVPGFVDLTLHDQVHLLECAWMEILMIGLVWRSMEHPGKLLFAPNLLLDRLQGKCVEGGVEIFDMLLATSSRFRMMNLQGEEFVCLKSIILLNSGVYTFLSSTLKSLEEKDHIHRVLDKITDTLIHLMAKAGLTLQQQHQRLAQLLLILSHIRHMSNKRMEHLYSMKCKNVVPLSDLLLEMLDAHRL

SEQ ID NO: 30 - DNA, 735 bp, Artificial Sequence
  Description of Artificial Sequence: Synthetic Destabilizing Domain (DD)
tcactggcgctcagccttactgccgaccaaatggtatcagctcttctggacgcagaacccccaattctttattccgagtacgaccccacacgcccgttcagtgaagcttccatgatgggcctccttacgaaccttgccgaccgggaactcgtgcacatgatcaattgggcgaagcgggtgccggggttcgtagatttgacacttcacgaccaagttcatctcttggaatgtgcttggatggagatattgatgatcggactcgtgtggaggtcaatggagcatcctggtaaacttcttttcgcacccaatctgctcttggatagactgcagggtaagtgcgtcgagggtggcgttgaaatcttcgacatgctccttgcgacatccagccgattccgaatgatgaatcttcaaggagaggaatttgtctgtcttaagagcattatactcctcaatagtggagtttacaccttcttgtcctctacactgaaatcacttgaggaaaaagatcacatacatagggtgttggataaaatcacggatacactcatacatctgatggcaaaagcaggattgaccctgcaacagcagcaccaacgactggcccaactgctgttgatccttagccatatcagacacatgtctaacaaaaggatggaacatttgtacagcatgaaatgtaagaacgtagtgccactgtccgatttgttgctggaaatgctggacgctcatcggctc

SEQ ID NO: 31 - protein, 245 aa, Artificial Sequence
  Description of Artificial Sequence: Synthetic Destabilizing Domain (DD)
SLALSLTADQMVSALLDAEPPILYSEYDPTRPFSEASMMGLLTNLADRELVHMINWAKRVPGFVDLTLHDQVHLLECAWMEILMIGLVWRSMEHPGKLLFAPNLLLDRYQGKCVEGGVEIFDMLLATSSRFRMMNLQGEEFVCLKSIILLNSGVYTFLSSTLKSLEEKDHIHRVLDKITDTLIHLMAKAGLTLQQQHQRLAQLLLILSHIRHMSNKRMEHLYSMKCKNVVPLSDLLLEMLDAHRL

SEQ ID NO: 32 - DNA, 735 bp, Artificial Sequence
  Description of Artificial Sequence: Synthetic Destabilizing Domain (DD)
tcactggcgctcagccttactgccgaccaaatggtatcagctcttctggacgcagaacccccaattctttattccgagtacgaccccacacgcccgttcagtgaagcttccatgatgggcctccttacgaaccttgccgaccgggaactcgtgcacatgatcaattgggcgaagcgggtgccggggttcgtagatttgacacttcacgaccaagttcatctcttggaatgtgcttggatggagatattgatgatcggactcgtgtggaggtcaatggagcatcctggtaaacttcttttcgcacccaatctgctcttggatagataccagggtaagtgcgtcgagggtggcgttgaaatcttcgacatgctccttgcgacatccagccgattccgaatgatgaatcttcaaggagaggaatttgtctgtcttaagagcattatactcctcaatagtggagtttacaccttcttgtcctctacactgaaatcacttgaggaaaaagatcacatacatagggtgttggataaaatcacggatacactcatacatctgatggcaaaagcaggattgaccctgcaacagcagcaccaacgactggcccaactgctgttgatccttagccatatcagacacatgtctaacaaaaggatggaacatttgtacagcatgaaatgtaagaacgtagtgccactgtccgatttgttgctggaaatgctggacgctcatcggctc

SEQ ID NO: 33 - protein, 245 aa, Artificial Sequence
  Description of Artificial Sequence: Synthetic Destabilizing Domain (DD)
SLALSLTADQMVSALLDAEPPILYSEYDPTRPFSEASMMGLLTNLADRELVHMINWAKRVPGFVDLTLHDQVHLLECAWMEILMIGLVWRSMEHPGKLLFAPNLLLDRHQGKCVEGGVEIFDMLLATSSRFRMMNLQGEEFVCLKSIILLNSGVYTFLSSTLKSLEEKDHIHRVLDKITDTLIHLMAKAGLTLQQQHQRLAQLLLILSHIRHMSNKRMEHLYSMKCKNVVPLSDLLLEMLDAHRL

SEQ ID NO: 34 - DNA, 735 bp, Artificial Sequence
  Description of Artificial Sequence: Synthetic Destabilizing Domain (DD)
tcactggcgctcagccttactgccgaccaaatggtatcagctcttctggacgcagaacccccaattctttattccgagtacgaccccacacgcccgttcagtgaagcttccatgatgggcctccttacgaaccttgccgaccgggaactcgtgcacatgatcaattgggcgaagcgggtgccggggttcgtagatttgacacttcacgaccaagttcatctcttggaatgtgcttggatggagatattgatgatcggactcgtgtggaggtcaatggagcatcctggtaaacttcttttcgcacccaatctgctcttggatagacaccagggtaagtgcgtcgagggtggcgttgaaatcttcgacatgctccttgcgacatccagccgattccgaatgatgaatcttcaaggagaggaatttgtctgtcttaagagcattatactcctcaatagtggagtttacaccttcttgtcctctacactgaaatcacttgaggaaaaagatcacatacatagggtgttggataaaatcacggatacactcatacatctgatggcaaaagcaggattgaccctgcaacagcagcaccaacgactggcccaactgctgttgatccttagccatatcagacacatgtctaacaaaaggatggaacatttgtacagcatgaaatgtaagaacgtagtgccactgtccgatttgttgctggaaatgctggacgctcatcggctc

SEQ ID NO: 35 - protein, 245 aa, Artificial Sequence
  Description of Artificial Sequence: Synthetic Destabilizing Domain (DD)
SLALSLTADQMVSALLDAEPPILYSEYDPTRPFSEASMMGLLTNLADRELVHMINWAKRVPGFVDLTLHDQVHLLECAWMEILMIGLVWRSMEHPGKLLFAPNLLLDRQQGKCVEGGVEIFDMLLATSSRFRMMNLQGEEFVCLKSIILLNSGVYTFLSSTLKSLEEKDHIHRVLDKITDTLIHLMAKAGLTLQQQHQRLAQLLLILSHIRHMSNKRMEHLYSMKCKNVVPLSDLLLEMLDAHRL

SEQ ID NO: 36 - DNA, 735 bp, Artificial Sequence
  Description of Artificial Sequence: Synthetic Destabilizing Domain (DD)
tcactggcgctcagccttactgccgaccaaatggtatcagctcttctggacgcagaacccccaattctttattccgagtacgaccccacacgcccgttcagtgaagcttccatgatgggcctccttacgaaccttgccgaccgggaactcgtgcacatgatcaattgggcgaagcgggtgccggggttcgtagatttgacacttcacgaccaagttcatctcttggaatgtgcttggatggagatattgatgatcggactcgtgtggaggtcaatggagcatcctggtaaacttcttttcgcacccaatctgctcttggatagacagcagggtaagtgcgtcgagggtggcgttgaaatcttcgacatgctccttgcgacatccagccgattccgaatgatgaatcttcaaggagaggaatttgtctgtcttaagagcattatactcctcaatagtggagtttacaccttcttgtcctctacactgaaatcacttgaggaaaaagatcacatacatagggtgttggataaaatcacggatacactcatacatctgatggcaaaagcaggattgaccctgcaacagcagcaccaacgactggcccaactgctgttgatccttagccatatcagacacatgtctaacaaaaggatggaacatttgtacagcatgaaatgtaagaacgtagtgccactgtccgatttgttgctggaaatgctggacgctcatcggctc

SEQ ID NO: 37 - protein, 245 aa, Artificial Sequence
  Description of Artificial Sequence: Synthetic Destabilizing Domain (DD)
SLALSLTADQMVSALLDAEPPILYSEYDPTRPFSEASMMGLLTNLADRELVHMINWAKRVPGFVDLTLHDQVHLLECAWMEILMIGLVWRSMEHPGKLLFAPNLLLDRIQGKCVEGGVEIFDMLLATSSRFRMMNLQGEEFVCLKSIILLNSGVYTFLSSTLKSLEEKDHIHRVLDKITDTLIHLMAKAGLTLQQQHQRLAQLLLILSHIRHMSNKRMEHLYSMKCKNVVPLSDLLLEMLDAHRL

SEQ ID NO: 38 - DNA, 735 bp, Artificial Sequence
  Description of Artificial Sequence: Synthetic Destabilizing Domain (DD)
tcactggcgctcagccttactgccgaccaaatggtatcagctcttctggacgcagaacccccaattctttattccgagtacgaccccacacgcccgttcagtgaagcttccatgatgggcctccttacgaaccttgccgaccgggaactcgtgcacatgatcaattgggcgaagcgggtgccggggttcgtagatttgacacttcacgaccaagttcatctcttggaatgtgcttggatggagatattgatgatcggactcgtgtggaggtcaatggagcatcctggtaaacttcttttcgcacccaatctgctcttggatagaatccagggtaagtgcgtcgagggtggcgttgaaatcttcgacatgctccttgcgacatccagccgattccgaatgatgaatcttcaaggagaggaatttgtctgtcttaagagcattatactcctcaatagtggagtttacaccttcttgtcctctacactgaaatcacttgaggaaaaagatcacatacatagggtgttggataaaatcacggatacactcatacatctgatggcaaaagcaggattgaccctgcaacagcagcaccaacgactggcccaactgctgttgatccttagccatatcagacacatgtctaacaaaaggatggaacatttgtacagcatgaaatgtaagaacgtagtgccactgtccgatttgttgctggaaatgctggacgctcatcggctc

SEQ ID NO: 39 - protein, 245 aa, Artificial Sequence
  Description of Artificial Sequence: Synthetic Destabilizing Domain (DD)
SLALSLTADQMVSALLDAEPPILYSEYDPTRPFSEASMMGLLTNLADRELVHMINWAKRVPGFVDLTLHDQVHLLECAWMEILMIGLVWRSMEHPGKLLFAPNLLLDRMQGKCVEGGVEIFDMLLATSSRFRMMNLQGEEFVCLKSIILLNSGVYTFLSSTLKSLEEKDHIHRVLDKITDTLIHLMAKAGLTLQQQHQRLAQLLLILSHIRHMSNKRMEHLYSMKCKNVVPLSDLLLEMLDAHRL

SEQ ID NO: 40 - DNA, 735 bp, Artificial Sequence
  Description of Artificial Sequence: Synthetic Destabilizing Domain (DD)
tcactggcgctcagccttactgccgaccaaatggtatcagctcttctggacgcagaacccccaattctttattccgagtacgaccccacacgcccgttcagtgaagcttccatgatgggcctccttacgaaccttgccgaccgggaactcgtgcacatgatcaattgggcgaagcgggtgccggggttcgtagatttgacacttcacgaccaagttcatctcttggaatgtgcttggatggagatattgatgatcggactcgtgtggaggtcaatggagcatcctggtaaacttcttttcgcacccaatctgctcttggatagaatgcagggtaagtgcgtcgagggtggcgttgaaatcttcgacatgctccttgcgacatccagccgattccgaatgatgaatcttcaaggagaggaatttgtctgtcttaagagcattatactcctcaatagtggagtttacaccttcttgtcctctacactgaaatcacttgaggaaaaagatcacatacatagggtgttggataaaatcacggatacactcatacatctgatggcaaaagcaggattgaccctgcaacagcagcaccaacgactggcccaactgctgttgatccttagccatatcagacacatgtctaacaaaaggatggaacatttgtacagcatgaaatgtaagaacgtagtgccactgtccgatttgttgctggaaatgctggacgctcatcggctc

SEQ ID NO: 41 - protein, 245 aa, Artificial Sequence
  Description of Artificial Sequence: Synthetic Destabilizing Domain (DD)
SLALSLTADQMVSALLDAEPPILYSEYDPTRPFSEASMMGLLTNLADRELVHMINWAKRVPGFVDLTLHDQVHLLECAWMEILMIGLVWRSMEHPGKLLFAPNLLLDRKQGKCVEGGVEIFDMLLATSSRFRMMNLQGEEFVCLKSIILLNSGVYTFLSSTLKSLEEKDHIHRVLDKITDTLIHLMAKAGLTLQQQHQRLAQLLLILSHIRHMSNKRMEHLYSMKCKNVVPLSDLLLEMLDAHRL

SEQ ID NO: 42 - DNA, 735 bp, Artificial Sequence
  Description of Artificial Sequence: Synthetic Destabilizing Domain (DD)
tcactggcgctcagccttactgccgaccaaatggtatcagctcttctggacgcagaacccccaattctttattccgagtacgaccccacacgcccgttcagtgaagcttccatgatgggcctccttacgaaccttgccgaccgggaactcgtgcacatgatcaattgggcgaagcgggtgccggggttcgtagatttgacacttcacgaccaagttcatctcttggaatgtgcttggatggagatattgatgatcggactcgtgtggaggtcaatggagcatcctggtaaacttcttttcgcacccaatctgctcttggatagaaagcagggtaagtgcgtcgagggtggcgttgaaatcttcgacatgctccttgcgacatccagccgattccgaatgatgaatcttcaaggagaggaatttgtctgtcttaagagcattatactcctcaatagtggagtttacaccttcttgtcctctacactgaaatcacttgaggaaaaagatcacatacatagggtgttggataaaatcacggatacactcatacatctgatggcaaaagcaggattgaccctgcaacagcagcaccaacgactggcccaactgctgttgatccttagccatatcagacacatgtctaacaaaaggatggaacatttgtacagcatgaaatgtaagaacgtagtgccactgtccgatttgttgctggaaatgctggacgctcatcggctc

SEQ ID NO: 43 - protein, 245 aa, Artificial Sequence
  Description of Artificial Sequence: Synthetic Destabilizing Domain (DD)
SLALSLTADQMVSALLDAEPPILYSEYDPTRPFSEASMMGLLTNLADRELVHMINWAKRVPGFVDLTLHDQVHLLECAWMEILMIGLVWRSMEHPGKLLFAPNLLLDRVQGKCVEGGVEIFDMLLATSSRFRMMNLQGEEFVCLKSIILLNSGVYTFLSSTLKSLEEKDHIHRVLDKITDTLIHLMAKAGLTLQQQHQRLAQLLLILSHIRHMSNKRMEHLYSMKCKNVVPLSDLLLEMLDAHRL

SEQ ID NO: 44 - DNA, 735 bp, Artificial Sequence
  Description of Artificial Sequence: Synthetic Destabilizing Domain (DD)
tcactggcgctcagccttactgccgaccaaatggtatcagctcttctggacgcagaacccccaattctttattccgagtacgaccccacacgcccgttcagtgaagcttccatgatgggcctccttacgaaccttgccgaccgggaactcgtgcacatgatcaattgggcgaagcgggtgccggggttcgtagatttgacacttcacgaccaagttcatctcttggaatgtgcttggatggagatattgatgatcggactcgtgtggaggtcaatggagcatcctggtaaacttcttttcgcacccaatctgctcttggatagagtgcagggtaagtgcgtcgagggtggcgttgaaatcttcgacatgctccttgcgacatccagccgattccgaatgatgaatcttcaaggagaggaatttgtctgtcttaagagcattatactcctcaatagtggagtttacaccttcttgtcctctacactgaaatcacttgaggaaaaagatcacatacatagggtgttggataaaatcacggatacactcatacatctgatggcaaaagcaggattgaccctgcaacagcagcaccaacgactggcccaactgctgttgatccttagccatatcagacacatgtctaacaaaaggatggaacatttgtacagcatgaaatgtaagaacgtagtgccactgtccgatttgttgctggaaatgctggacgctcatcggctc

SEQ ID NO: 45 - protein, 245 aa, Artificial Sequence
  Description of Artificial Sequence: Synthetic Destabilizing Domain (DD)
SLALSLTADQMVSALLDAEPPILYSEYDPTRPFSEASMMGLLTNLADRELVHMINWAKRVPGFVDLTLHDQVHLLECAWMEILMIGLVWRSMEHPGKLLFAPNLLLDRSQGKCVEGGVEIFDMLLATSSRFRMMNLQGEEFVCLKSIILLNSGVYTFLSSTLKSLEEKDHIHRVLDKITDTLIHLMAKAGLTLQQQHQRLAQLLLILSHIRHMSNKRMEHLYSMKCKNVVPLSDLLLEMLDAHRL

SEQ ID NO: 46 - DNA, 735 bp, Artificial Sequence
  Description of Artificial Sequence: Synthetic Destabilizing Domain (DD)
tcactggcgctcagccttactgccgaccaaatggtatcagctcttctggacgcagaacccccaattctttattccgagtacgaccccacacgcccgttcagtgaagcttccatgatgggcctccttacgaaccttgccgaccgggaactcgtgcacatgatcaattgggcgaagcgggtgccggggttcgtagatttgacacttcacgaccaagttcatctcttggaatgtgcttggatggagatattgatgatcggactcgtgtggaggtcaatggagcatcctggtaaacttcttttcgcacccaatctgctcttggatagaagccagggtaagtgcgtcgagggtggcgttgaaatcttcgacatgctccttgcgacatccagccgattccgaatgatgaatcttcaaggagaggaatttgtctgtcttaagagcattatactcctcaatagtggagtttacaccttcttgtcctctacactgaaatcacttgaggaaaaagatcacatacatagggtgttggataaaatcacggatacactcatacatctgatggcaaaagcaggattgaccctgcaacagcagcaccaacgactggcccaactgctgttgatccttagccatatcagacacatgtctaacaaaaggatggaacatttgtacagcatgaaatgtaagaacgtagtgccactgtccgatttgttgctggaaatgctggacgctcatcggctc

SEQ ID NO: 47 - protein, 245 aa, Artificial Sequence
  Description of Artificial Sequence: Synthetic Destabilizing Domain (DD)
SLALSLTADQMVSALLDAEPPILYSEYDPTRPFSEASMMGLLTNLADRELVHMINWAKRVPGFVDLTLHDQVHLLECAWMEILMIGLVWRSMEHPGKLLFAPNLLLDRCQGKCVEGGVEIFDMLLATSSRFRMMNLQGEEFVCLKSIILLNSGVYTFLSSTLKSLEEKDHIHRVLDKITDTLIHLMAKAGLTLQQQHQRLAQLLLILSHIRHMSNKRMEHLYSMKCKNVVPLSDLLLEMLDAHRL

SEQ ID NO: 48 - DNA, 735 bp, Artificial Sequence
  Description of Artificial Sequence: Synthetic Destabilizing Domain (DD)
tcactggcgctcagccttactgccgaccaaatggtatcagctcttctggacgcagaacccccaattctttattccgagtacgaccccacacgcccgttcagtgaagcttccatgatgggcctccttacgaaccttgccgaccgggaactcgtgcacatgatcaattgggcgaaacgggtgccggggttcgtagatttgacacttcacgaccaagttcatctcttggaatgtgcttggatggagatattgatgatcggactcgtgtggaggtcaatggagcatcctggtaaacttcttttcgcacccaatctgctcttggatagatgccagggtaagtgcgtcgagggtggcgttgaaatcttcgacatgctccttgcgacatccagccgattccgaatgatgaatcttcaaggagaggaatttgtctgtcttaagagcattatactcctcaatagtggagtttacaccttcttgtcctctacactgaaatcacttgaggaaaaagatcacatacatagggtgttggataaaatcacggatacactcatacatctgatggcaaaagcaggattgaccctgcaacagcagcaccaacgactggcccaactgctgttgatccttagccatatcagacacatgtctaacaaaaggatggaacatttgtacagcatgaaatgtaagaacgtagtgccactgtccgatttgttgctggaaatgctggacgctcatcggctc

SEQ ID NO: 49 - protein, 245 aa, Artificial Sequence
  Description of Artificial Sequence: Synthetic Destabilizing Domain (DD)
SLALSLTADQMVSALLDAEPPILYSEYDPTRPFSEASMMGLLTNLADRELVHMINWAKRVPGFVDLTLHDQVHLLECAWMEILMIGLVWRSMEHPGKLLFAPNLLLDRWQGKCVEGGVEIFDMLLATSSRFRMMNLQGEEFVCLKSIILLNSGVYTFLSSTLKSLEEKDHIHRVLDKITDTLIHLMAKAGLTLQQQHQRLAQLLLILSHIRHMSNKRMEHLYSMKCKNVVPLSDLLLEMLDAHRL

SEQ ID NO: 50 - DNA, 735 bp, Artificial Sequence
  Description of Artificial Sequence: Synthetic Destabilizing Domain (DD)
tcactggcgctcagccttactgccgaccaaatggtatcagctcttctggacgcagaacccccaattctttattccgagtacgaccccacacgcccgttcagtgaagcttccatgatgggcctccttacgaaccttgccgaccgggaactcgtgcacatgatcaattgggcgaagcgggtgccggggttcgtagatttgacacttcacgaccaagttcatctcttggaatgtgcttggatggagatattgatgatcggactcgtgtggaggtcaatggagcatcctggtaaacttcttttcgcacccaatctgctcttggatagatggcagggtaagtgcgtcgagggtggcgttgaaatcttcgacatgctccttgcgacatccagccgattccgaatgatgaatcttcaaggagaggaatttgtctgtcttaagagcattatactcctcaatagtggagtttacaccttcttgtcctctacactgaaatcacttgaggaaaaagatcacatacatagggtgttggataaaatcacggatacactcatacatctgatggcaaaagcaggattgaccctgcaacagcagcaccaacgactggcccaactgctgttgatccttagccatatcagacacatgtctaacaaaaggatggaacatttgtacagcatgaaatgtaagaacgtagtgccactgtccgatttgttgctggaaatgctggacgctcatcggctc

SEQ ID NO: 51 - protein, 245 aa, Artificial Sequence
  Description of Artificial Sequence: Synthetic Destabilizing Domain (DD)
SLALSLTADQMVSALLDAEPPILYSEYDPTRPFSEASMMGLLTNLADRELVHMINWAKRVPGFVDLTLHDQVHLLECAWMEILMIGLVWRSMEHPGKLLFAPNLLLDRPQGKCVEGGVEIFDMLLATSSRFRMMNLQGEEFVCLKSIILLNSGVYTFLSSTLKSLEEKDHIHRVLDKITDTLIHLMAKAGLTLQQQHQRLAQLLLILSHIRHMSNKRMEHLYSMKCKNVVPLSDLLLEMLDAHRL

SEQ ID NO: 52 - DNA, 735 bp, Artificial Sequence
  Description of Artificial Sequence: Synthetic Destabilizing Domain (DD)
tcactggcgctcagccttactgccgaccaaatggtatcagctcttctggacgcagaacccccaattctttattccgagtacgaccccacacgcccgttcagtgaagcttccatgatgggcctccttacgaaccttgccgaccgggaactcgtgcacatgatcaattgggcgaagcgggtgccggggttcgtagatttgacacttcacgaccaagttcatctcttggaatgtgcttggatggagatattgatgatcggactcgtgtggaggtcaatggagcatcctggtaaacttcttttcgcacccaatctgctcttggatagaccccagggtaagtgcgtcgagggtggcgttgaaatcttcgacatgctccttgcgacatccagccgattccgaatgatgaatcttcaaggagaggaatttgtctgtcttaagagcattatactcctcaatagtggagtttacaccttcttgtcctctacactgaaatcacttgaggaaaaagatcacatacatagggtgttggataaaatcacggatacactcatacatctgatggcaaaagcaggattgaccctgcaacagcagcaccaacgactggcccaactgctgttgatccttagccatatcagacacatgtctaacaaaaggatggaacatttgtacagcatgaaatgtaagaacgtagtgccactgtccgatttgttgctggaaatgctggacgctcatcggctc

SEQ ID NO: 53 - protein, 245 aa, Artificial Sequence
  Description of Artificial Sequence: Synthetic Destabilizing Domain (DD)
SLALSLTADQMVSALLDAEPPILYSEYDPTRPFSEASMMGLLTNLADRELVHMINWAKRVPGFVDLTLHDQVHLLECAWMEILMIGLVWRSMEHPGKLLFAPNLLLDRRQGKCVEGGVEIFDMLLATSSRFRMMNLQGEEFVCLKSIILLNSGVYTFLSSTLKSLEEKDHIHRVLDKITDTLIHLMAKAGLTLQQQHQRLAQLLLILSHIRHMSNKRMEHLYSMKCKNVVPLSDLLLEMLDAHRL

SEQ ID NO: 54 - DNA, 735 bp, Artificial Sequence
  Description of Artificial Sequence: Synthetic Destabilizing Domain (DD)
tcactggcgctcagccttactgccgaccaaatggtatcagctcttctggacgcagaacccccaattctttattccgagtacgaccccacacgcccgttcagtgaagcttccatgatgggcctccttacgaaccttgccgaccgggaactcgtgcacatgatcaattgggcgaagcgggtgccggggttcgtagatttgacacttcacgaccaagttcatctcttggaatgtgcttggatggagatattgatgatcggactcgtgtggaggtcaatggagcatcctggtaaacttcttttcgcacccaatctgctcttggatagacgacagggtaagtgcgtcgagggtggcgttgaaatcttcgacatgctccttgcgacatccagccgattccgaatgatgaatcttcaaggagaggaatttgtctgtcttaagagcattatactcctcaatagtggagtttacaccttcttgtcctctacactgaaatcacttgaggaaaaagatcacatacatagggtgttggataaaatcacggatacactcatacatctgatggcaaaagcaggattgaccctgcaacagcagcaccaacgactggcccaactgctgttgatccttagccatatcagacacatgtctaacaaaaggatggaacatttgtacagcatgaaatgtaagaacgtagtgccactgtccgatttgttgctggaaatgctggacgctcatcggctc

SEQ ID NO: 55 - protein, 245 aa, Artificial Sequence
  Description of Artificial Sequence: Synthetic Destabilizing Domain (DD)
SLALSLTADQMVSALLDAEPPILYSEYDPTRPFSEASMMGLLTNLADRELVHMINWAKRVPGFVDLTLHDQVHLLECAWMEILMIGLVWRSMEHPGKLLFAPNLLLDRTQGKCVEGGVEIFDMLLATSSRFRMMNLQGEEFVCLKSIILLNSGVYTFLSSTLKSLEEKDHIHRVLDKITDTLIHLMAKAGLTLQQQHQRLAQLLLILSHIRHMSNKRMEHLYSMKCKNVVPLSDLLLEMLDAHRL

SEQ ID NO: 56 - DNA, 735 bp, Artificial Sequence
  Description of Artificial Sequence: Synthetic Destabilizing Domain (DD)
tcactggcgctcagccttactgccgaccaaatggtatcagctcttctggacgcagaacccccaattctttattccgagtacgaccccacacgcccgttcagtgaagcttccatgatgggcctccttacgaaccttgccgaccgggaactcgtgcacatgatcaattgggcgaagcgggtgccggggttcgtagatttgacacttcacgaccaagttcatctcttggaatgtgcttggatggagatattgatgatcggactcgtgtggaggtcaatggagcatcctggtaaacttcttttcgcacccaatctgctcttggatagaacccagggtaagtgcgtcgagggtggcgttgaaatcttcgacatgctccttgcgacatccagccgattccgaatgatgaatcttcaaggagaggaatttgtctgtcttaagagcattatactcctcaatagtggagtttacaccttcttgtcctctacactgaaatcacttgaggaaaaagatcacatacatagggtgttggataaaatcacggatacactcatacatctgatggcaaaagcaggattgaccctgcaacagcagcaccaacgactggcccaactgctgttgatccttagccatatcagacacatgtctaacaaaaggatggaacatttgtacagcatgaaatgtaagaacgtagtgccactgtccgatttgttgctggaaatgctggacgctcatcggctc

SEQ ID NO: 57 - protein, 245 aa, Artificial Sequence
  Description of Artificial Sequence: Synthetic Destabilizing Domain (DD)
SLALSLTADQMVSALLDAEPPILYSEYDPTRPFSEASMMGLLTNLADRELVHMINWAKRVPGFVDLTLHDQVHLLECAWMEILMIGLVWRSMEHPGKLLFAPNLLLDRAQGKCVEGGVEIFDMLLATSSRFRMMNLQGEEFVCLKSIILLNSGVYTFLSSTLKSLEEKDHIHRVLDKITDTLIHLMAKAGLTLQQQHQRLAQLLLILSHIRHMSNKRMEHLYSMKCKNVVPLSDLLLEMLDAHRL

SEQ ID NO: 58 - DNA, 735 bp, Artificial Sequence
  Description of Artificial Sequence: Synthetic Destabilizing Domain (DD)
tcactggcgctcagccttactgccgaccaaatggtatcagctcttctggacgcagaacccccaattctttattccgagtacgaccccacacgcccgttcagtgaagcttccatgatgggcctccttacgaaccttgccgaccgggaactcgtgcacatgatcaattgggcgaagcgggtgccggggttcgtagatttgacacttcacgaccaagttcatctcttggaatgtgcttggatggagatattgatgatcggactcgtgtggaggtcaatggagcatcctggtaaacttcttttcgcacccaatctgctcttggatagagcccagggtaagtgcgtcgagggtggcgttgaaatcttcgacatgctccttgcgacatccagccgattccgaatgatgaatcttcaaggagaggaatttgtctgtcttaagagcattatactcctcaatagtggagtttacaccttcttgtcctctacactgaaatcacttgaggaaaaagatcacatacatagggtgttggataaaatcacggatacactcatacatctgatggcaaaagcaggattgaccctgcaacagcagcaccaacgactggcccaactgctgttgatccttagccatatcagacacatgtctaacaaaaggatggaacatttgtacagcatgaaatgtaagaacgtagtgccactgtccgatttgttgctggaaatgctggacgctcatcggctc

SEQ ID NO: 59 - protein, 245 aa, Artificial Sequence
  Description of Artificial Sequence: Synthetic Destabilizing Domain (DD)
SLALSLTADQMVSALLDAEPPILYSEYDPTRPFSEASMMGLLTNLADRELVHMINWAKRVPGFVDLTLHDQVHLLECAWMEILMIGLVWRSMEHPGKLLFAPNLLLDREQGKCVEGGVEIFDMLLATSSRFRMMNLQGEEFVCLKSIILLNSGVYTFLSSTLKSLEEKDHIHRVLDKITDTLIHLMAKAGLTLQQQHQRLAQLLLILSHIRHMSNKRMEHLYSMKCKNVVPLSDLLLEMLDAHRL

SEQ ID NO: 60 - DNA, 735 bp, Artificial Sequence
  Description of Artificial Sequence: Synthetic Destabilizing Domain (DD)
tcactggcgctcagccttactgccgaccaaatggtatcagctcttctggacgcagaacccccaattctttattccgagtacgaccccacacgcccgttcagtgaagcttccatgatgggcctccttacgaaccttgccgaccgggaactcgtgcacatgatcaattgggcgaagcgggtgccggggttcgtagatttgacacttcacgaccaagttcatctcttggaatgtgcttggatggagatattgatgatcggactcgtgtggaggtcaatggagcatcctggtaaacttcttttcgcacccaatctgctcttggatagagagcagggtaagtgcgtcgagggtggcgttgaaatcttcgacatgctccttgcgacatccagccgattccgaatgatgaatcttcaaggagaggaatttgtctgtcttaagagcattatactcctcaatagtggagtttacaccttcttgtcctctacactgaaatcacttgaggaaaaagatcacatacatagggtgttggataaaatcacggatacactcatacatctgatggcaaaagcaggattgaccctgcaacagcagcaccaacgactggcccaactgctgttgatccttagccatatcagacacatgtctaacaaaaggatggaacatttgtacagcatgaaatgtaagaacgtagtgccactgtccgatttgttgctggaaatgctggacgctcatcggctc

SEQ ID NO: 61 - protein, 245 aa, Artificial Sequence
  Description of Artificial Sequence: Synthetic Destabilizing Domain (DD)
SLALSLTADQMVSALLDAEPPILYSEYDPTRPFSEASMMGLLTNLADRELVHMINWAKRVPGFVDLTLHDQVHLLECAWMEILMIGLVWRSMEHPGKLLFAPNLLLDRGQGKCVEGGVEIFDMLLATSSRFRMMNLQGEEFVCLKSIILLNSGVYTFLSSTLKSLEEKDHIHRVLDKITDTLIHLMAKAGLTLQQQHQRLAQLLLILSHIRHMSNKRMEHLYSMKCKNVVPLSDLLLEMLDAHRL

SEQ ID NO: 62 - DNA, 735 bp, Artificial Sequence
  Description of Artificial Sequence: Synthetic Destabilizing Domain (DD)
tcactggcgctcagccttactgccgaccaaatggtatcagctcttctggacgcagaacccccaattctttattccgagtacgaccccacacgcccgttcagtgaagcttccatgatgggcctccttacgaaccttgccgaccgggaactcgtgcacatgatcaattgggcgaagcgggtgccggggttcgtagatttgacacttcacgaccaagttcatctcttggaatgtgcttggatggagatattgatgatcggactcgtgtggaggtcaatggagcatcctggtaaacttcttttcgcacccaatctgctcttggatagaggccagggtaagtgcgtcgagggtggcgttgaaatcttcgacatgctccttgcgacatccagccgattccgaatgatgaatcttcaaggagaggaatttgtctgtcttaagagcattatactcctcaatagtggagtttacaccttcttgtcctctacactgaaatcacttgaggaaaaagatcacatacatagggtgttggataaaatcacggatacactcatacatctgatggcaaaagcaggattgaccctgcaacagcagcaccaacgactggcccaactgctgttgatccttagccatatcagacacatgtctaacaaaaggatggaacatttgtacagcatgaaatgtaagaacgtagtgccactgtccgatttgttgctggaaatgctggacgctcatcggctc

SEQ ID NO: 63 - protein, 245 aa, Artificial Sequence
  Description of Artificial Sequence: Synthetic Destabilizing Domain (DD)
SLALSLTADQMVSALLDAEPPILYSEYDPTRPFSEASMMGLLTNLADRELVHMINWAKRVPGFVDLTLHDQVHLLECAWMEILMIGLVWRSMEHPGKLLFAPNLLLDRNQGKCVEGGVEIFDMLLATSSRFRMMNLQGEEFVCLKSIILLNSGVYTFLSSTLKSLEEKDHIHRVLDKITDTLIHLMAKAGLTLQQQHFRLAQLLLILSHIRHMSNKRMEHLYSMKCKNVVPLSDLLLEMLDAHRL

SEQ ID NO: 64 - DNA, 735 bp, Artificial Sequence
  Description of Artificial Sequence: Synthetic Destabilizing Domain (DD)
tcactggcgctcagccttactgccgaccaaatggtatcagctcttctggacgcagaacccccaattctttattccgagtacgaccccacacgcccgttcagtgaagcttccatgatgggcctccttacgaaccttgccgaccgggaactcgtgcacatgatcaattgggcgaagcgggtgccggggttcgtagatttgacacttcacgaccaagttcatctcttggaatgtgcttggatggagatattgatgatcggactcgtgtggaggtcaatggagcatcctggtaaacttcttttcgcacccaatctgctcttggatagaaatcagggtaagtgcgtcgagggtggcgttgaaatcttcgacatgctccttgcgacatccagccgattccgaatgatgaatcttcaaggagaggaatttgtctgtcttaagagcattatactcctcaatagtggagtttacaccttcttgtcctctacactgaaatcacttgaggaaaaagatcacatacatagggtgttggataaaatcacggatacactcatacatctgatggcaaaagcaggattgaccctgcaacagcagcacttccgactggcccaactgctgttgatccttagccatatcagacacatgtctaacaaaaggatggaacatttgtacagcatgaaatgtaagaacgtagtgccactgtccgatttgttgctggaaatgctggacgctcatcggctc

SEQ ID NO: 65 - protein, 245 aa, Artificial Sequence
  Description of Artificial Sequence: Synthetic Destabilizing Domain (DD)
SLALSLTADQMVSALLDAEPPILYSEYDPTRPFSEASMMGLLTNLADRELVHMINWAKRVPGFVDLTLHDQVHLLECAWMEILMIGLVWRSMEHPGKLLFAPNLLLDRNQGKCVEGGVEIFDMLLATSSRFRMMNLQGEEFVCLKSIILLNSGVYTFLSSTLKSLEEKDHIHRVLDKITDTLIHLMAKAGLTLQQQHLRLAQLLLILSHIRHMSNKRMEHLYSMKCKNVVPLSDLLLEMLDAHRL

SEQ ID NO: 66 - DNA, 735 bp, Artificial Sequence
  Description of Artificial Sequence: Synthetic Destabilizing Domain (DD)
tcactggcgctcagccttactgccgaccaaatggtatcagctcttctggacgcagaacccccaattctttattccgagtacgaccccacacgcccgttcagtgaagcttccatgatgggcctccttacgaaccttgccgaccgggaactcgtgcacatgatcaattgggcgaagcgggtgccggggttcgtagatttgacacttcacgaccaagttcatctcttggaatgtgcttggatggagatattgatgatcggactcgtgtggaggtcaatggagcatcctggtaaacttcttttcgcacccaatctgctcttggatagaaatcagggtaagtgcgtcgagggtggcgttgaaatcttcgacatgctccttgcgacatccagccgattccgaatgatgaatcttcaaggagaggaatttgtctgtcttaagagcattatactcctcaatagtggagtttacaccttcttgtcctctacactgaaatcacttgaggaaaaagatcacatacatagggtgttggataaaatcacggatacactcatacatctgatggcaaaagcaggattgaccctgcaacagcagcacctgcgactggcccaactgctgttgatccttagccatatcagacacatgtctaacaaaaggatggaacatttgtacagcatgaaatgtaagaacgtagtgccactgtccgatttgttgctggaaatgctggacgctcatcggctc

SEQ ID NO: 67 - protein, 245 aa, Artificial Sequence
  Description of Artificial Sequence: Synthetic Destabilizing Domain (DD)
SLALSLTADQMVSALLDAEPPILYSEYDPTRPFSEASMMGLLTNLADRELVHMINWAKRVPGFVDLTLHDQVHLLECAWMEILMIGLVWRSMEHPGKLLFAPNLLLDRNQGKCVEGGVEIFDMLLATSSRFRMMNLQGEEFVCLKSIILLNSGVYTFLSSTLKSLEEKDHIHRVLDKITDTLIHLMAKAGLTLQQQHYRLAQLLLILSHIRHMSNKRMEHLYSMKCKNVVPLSDLLLEMLDAHRL

SEQ ID NO: 68 - DNA, 735 bp, Artificial Sequence
  Description of Artificial Sequence: Synthetic Destabilizing Domain (DD)
tcactggcgctcagccttactgccgaccaaatggtatcagctcttctggacgcagaacccccaattctttattccgagtacgaccccacacgcccgttcagtgaagcttccatgatgggcctccttacgaaccttgccgaccgggaactcgtgcacatgatcaattgggcgaagcgggtgccggggttcgtagatttgacacttcacgaccaagttcatctcttggaatgtgcttggatggagatattgatgatcggactcgtgtggaggtcaatggagcatcctggtaaacttcttttcgcacccaatctgctcttggatagaaatcagggtaagtgcgtcgagggtggcgttgaaatcttcgacatgctccttgcgacatccagccgattccgaatgatgaatcttcaaggagaggaatttgtctgtcttaagagcattatactcctcaatagtggagtttacaccttcttgtcctctacactgaaatcacttgaggaaaaagatcacatacatagggtgttggataaaatcacggatacactcatacatctgatggcaaaagcaggattgaccctgcaacagcagcactaccgactggcccaactgctgttgatccttagccatatcagacacatgtctaacaaaaggatggaacatttgtacagcatgaaatgtaagaacgtagtgccactgtccgatttgttgctggaaatgctggacgctcatcggctc

SEQ ID NO: 69 - protein, 245 aa, Artificial Sequence
  Description of Artificial Sequence: Synthetic Destabilizing Domain (DD)
SLALSLTADQMVSALLDAEPPILYSEYDPTRPFSEASMMGLLTNLADRELVHMINWAKRVPGFVDLTLHDQVHLLECAWMEILMIGLVWRSMEHPGKLLFAPNLLLDRNQGKCVEGGVEIFDMLLATSSRFRMMNLQGEEFVCLKSIILLNSGVYTFLSSTLKSLEEKDHIHRVLDKITDTLIHLMAKAGLTLQQQHHRLAQLLLILSHIRHMSNKRMEHLYSMKCKNVVPLSDLLLEMLDAHRL

SEQ ID NO: 70 - DNA, 735 bp, Artificial Sequence
  Description of Artificial Sequence: Synthetic Destabilizing Domain (DD)
tcactggcgctcagccttactgccgaccaaatggtatcagctcttctggacgcagaacccccaattctttattccgagtacgaccccacacgcccgttcagtgaagcttccatgatgggcctccttacgaaccttgccgaccgggaactcgtgcacatgatcaattgggcgaagcgggtgccggggttcgtagatttgacacttcacgaccaagttcatctcttggaatgtgcttggatggagatattgatgatcggactcgtgtggaggtcaatggagcatcctggtaaacttcttttcgcacccaatctgctcttggatagaaatcagggtaagtgcgtcgagggtggcgttgaaatcttcgacatgctccttgcgacatccagccgattccgaatgatgaatcttcaaggagaggaatttgtctgtcttaagagcattatactcctcaatagtggagtttacaccttcttgtcctctacactgaaatcacttgaggaaaaagatcacatacatagggtgttggataaaatcacggatacactcatacatctgatggcaaaagcaggattgaccctgcaacagcagcaccaccgactggcccaactgctgttgatccttagccatatcagacacatgtctaacaaaaggatggaacatttgtacagcatgaaatgtaagaacgtagtgccactgtccgatttgttgctggaaatgctggacgctcatcggctc

SEQ ID NO: 71 - protein, 245 aa, Artificial Sequence
  Description of Artificial Sequence: Synthetic Destabilizing Domain (DD)
SLALSLTADQMVSALLDAEPPILYSEYDPTRPFSEASMMGLLTNLADRELVHMINWAKRVPGFVDLTLHDQVHLLECAWMEILMIGLVWRSMEHPGKLLFAPNLLLDRNQGKCVEGGVEIFDMLLATSSRFRMMNLQGEEFVCLKSIILLNSGVYTFLSSTLKSLEEKDHIHRVLDKITDTLIHLMAKAGLTLQQQHIRLAQLLLILSHIRHMSNKRMEHLYSMKCKNVVPLSDLLLEMLDAHRL

SEQ ID NO: 72 - DNA, 735 bp, Artificial Sequence
  Description of Artificial Sequence: Synthetic Destabilizing Domain (DD)
tcactggcgctcagccttactgccgaccaaatggtatcagctcttctggacgcagaacccccaattctttattccgagtacgaccccacacgcccgttcagtgaagcttccatgatgggcctccttacgaaccttgccgaccgggaactcgtgcacatgatcaattgggcgaagcgggtgccggggttcgtagatttgacacttcacgaccaagttcatctcttggaatgtgcttggatggagatattgatgatcggactcgtgtggaggtcaatggagcatcctggtaaacttcttttcgcacccaatctgctcttggatagaaatcagggtaagtgcgtcgagggtggcgttgaaatcttcgacatgctccttgcgacatccagccgattccgaatgatgaatcttcaaggagaggaatttgtctgtcttaagagcattatactcctcaatagtggagtttacaccttcttgtcctctacactgaaatcacttgaggaaaaagatcacatacatagggtgttggataaaatcacggatacactcatacatctgatggcaaaagcaggattgaccctgcaacagcagcacatccgactggcccaactgctgttgatccttagccatatcagacacatgtctaacaaaaggatggaacatttgtacagcatgaaatgtaagaacgtagtgccactgtccgatttgttgctggaaatgctggacgctcatcggctc

SEQ ID NO: 73 - protein, 245 aa, Artificial Sequence
  Description of Artificial Sequence: Synthetic Destabilizing Domain (DD)
SLALSLTADQMVSALLDAEPPILYSEYDPTRPFSEASMMGLLTNLADRELVHMINWAKRVPGFVDLTLHDQVHLLECAWMEILMIGLVWRSMEHPGKLLFAPNLLLDRNQGKCVEGGVEIFDMLLATSSRFRMMNLQGEEFVCLKSIILLNSGVYTFLSSTLKSLEEKDHIHRVLDKITDTLIHLMAKAGLTLQQQHMRLAQLLLILSHIRHMSNKRMEHLYSMKCKNVVPLSDLLLEMLDAHRL

SEQ ID NO: 74 - DNA, 735 bp, Artificial Sequence
  Description of Artificial Sequence: Synthetic Destabilizing Domain (DD)
tcactggcgctcagccttactgccgaccaaatggtatcagctcttctggacgcagaacccccaattctttattccgagtacgaccccacacgcccgttcagtgaagcttccatgatgggcctccttacgaaccttgccgaccgggaactcgtgcacatgatcaattgggcgaagcgggtgccggggttcgtagatttgacacttcacgaccaagttcatctcttggaatgtgcttggatggagatattgatgatcggactcgtgtggaggtcaatggagcatcctggtaaacttcttttcgcacccaatctgctcttggatagaaatcagggtaagtgcgtcgagggtggcgttgaaatcttcgacatgctccttgcgacatccagccgattccgaatgatgaatcttcaaggagaggaatttgtctgtcttaagagcattatactcctcaatagtggagtttacaccttcttgtcctctacactgaaatcacttgaggaaaaagatcacatacatagggtgttggataaaatcacggatacactcatacatctgatggcaaaagcaggattgaccctgcaacagcagcacatgcgactggcccaactgctgttgatccttagccatatcagacacatgtctaacaaaaggatggaacatttgtacagcatgaaatgtaagaacgtagtgccactgtccgatttgttgctggaaatgctggacgctcatcggctc

SEQ ID NO: 75 - protein, 245 aa, Artificial Sequence
  Description of Artificial Sequence: Synthetic Destabilizing Domain (DD)
SLALSLTADQMVSALLDAEPPILYSEYDPTRPFSEASMMGLLTNLADRELVHMINWAKRVPGFVDLTLHDQVHLLECAWMEILMIGLVWRSMEHPGKLLFAPNLLLDRNQGKCVEGGVEIFDMLLATSSRFRMMNLQGEEFVCLKSIILLNSGVYTFLSSTLKSLEEKDHIHRVLDKITDTLIHLMAKAGLTLQQQHNRLAQLLLILSHIRHMSNKRMEHLYSMKCKNVVPLSDLLLEMLDAHRL

SEQ ID NO: 76 - DNA, 735 bp, Artificial Sequence
  Description of Artificial Sequence: Synthetic Destabilizing Domain (DD)
tcactggcgctcagccttactgccgaccaaatggtatcagctcttctggacgcagaacccccaattctttattccgagtacgaccccacacgcccgttcagtgaagcttccatgatgggcctccttacgaaccttgccgaccgggaactcgtgcacatgatcaattgggcgaagcgggtgccggggttcgtagatttgacacttcacgaccaagttcatctcttggaatgtgcttggatggagatattgatgatcggactcgtgtggaggtcaatggagcatcctggtaaacttcttttcgcacccaatctgctcttggatagaaatcagggtaagtgcgtcgagggtggcgttgaaatcttcgacatgctccttgcgacatccagccgattccgaatgatgaatcttcaaggagaggaatttgtctgtcttaagagcattatactcctcaatagtggagtttacaccttcttgtcctctacactgaaatcacttgaggaaaaagatcacatacatagggtgttggataaaatcacggatacactcatacatctgatggcaaaagcaggattgaccctgcaacagcagcacaaccgactggcccaactgctgttgatccttagccatatcagacacatgtctaacaaaaggatggaacatttgtacagcatgaaatgtaagaacgtagtgccactgtccgatttgttgctggaaatgctggacgctcatcggctc

SEQ ID NO: 77 - protein, 245 aa, Artificial Sequence
  Description of Artificial Sequence: Synthetic Destabilizing Domain (DD)
SLALSLTADQMVSALLDAEPPILYSEYDPTRPFSEASMMGLLTNLADRELVHMINWAKRVPGFVDLTLHDQVHLLECAWMEILMIGLVWRSMEHPGKLLFAPNLLLDRNQGKCVEGGVEIFDMLLATSSRFRMMNLQGEEFVCLKSIILLNSGVYTFLSSTLKSLEEKDHIHRVLDKITDTLIHLMAKAGLTLQQQHKRLAQLLLILSHIRHMSNKRMEHLYSMKCKNVVPLSDLLLEMLDAHRL

SEQ ID NO: 78 - DNA, 735 bp, Artificial Sequence
  Description of Artificial Sequence: Synthetic Destabilizing Domain (DD)
tcactggcgctcagccttactgccgaccaaatggtatcagctcttctggacgcagaacccccaattctttattccgagtacgaccccacacgcccgttcagtgaagcttccatgatgggcctccttacgaaccttgccgaccgggaactcgtgcacatgatcaattgggcgaagcgggtgccggggttcgtagatttgacacttcacgaccaagttcatctcttggaatgtgcttggatggagatattgatgatcggactcgtgtggaggtcaatggagcatcctggtaaacttcttttcgcacccaatctgctcttggatagaaatcagggtaagtgcgtcgagggtggcgttgaaatcttcgacatgctccttgcgacatccagccgattccgaatgatgaatcttcaaggagaggaatttgtctgtcttaagagcattatactcctcaatagtggagtttacaccttcttgtcctctacactgaaatcacttgaggaaaaagatcacatacatagggtgttggataaaatcacggatacactcatacatctgatggcaaaagcaggattgaccctgcaacagcagcacaagcgactggcccaactgctgttgatccttagccatatcagacacatgtctaacaaaaggatggaacatttgtacagcatgaaatgtaagaacgtagtgccactgtccgatttgttgctggaaatgctggacgctcatcggctc

SEQ ID NO: 79 - protein, 245 aa, Artificial Sequence
  Description of Artificial Sequence: Synthetic Destabilizing Domain (DD)
SLALSLTADQMVSALLDAEPPILYSEYDPTRPFSEASMMGLLTNLADRELVHMINWAKRVPGFVDLTLHDQVHLLECAWMEILMIGLVWRSMEHPGKLLFAPNLLLDRNQGKCVEGGVEIFDMLLATSSRFRMMNLQGEEFVCLKSIILLNSGVYTFLSSTLKSLEEKDHIHRVLDKITDTLIHLMAKAGLTLQQQHVRLAQLLLILSHIRHMSNKRMEHLYSMKCKNVVPLSDLLLEMLDAHRL

SEQ ID NO: 80 - DNA, 735 bp, Artificial Sequence
  Description of Artificial Sequence: Synthetic Destabilizing Domain (DD)
tcactggcgctcagccttactgccgaccaaatggtatcagctcttctggacgcagaacccccaattctttattccgagtacgaccccacacgcccgttcagtgaagcttccatgatgggcctccttacgaaccttgccgaccgggaactcgtgcacatgatcaattgggcgaagcgggtgccggggttcgtagatttgacacttcacgaccaagttcatctcttggaatgtgcttggatggagatattgatgatcggactcgtgtggaggtcaatggagcatcctggtaaacttcttttcgcacccaatctgctcttggatagaaatcagggtaagtgcgtcgagggtggcgttgaaatcttcgacatgctccttgcgacatccagccgattccgaatgatgaatcttcaaggagaggaatttgtctgtcttaagagcattatactcctcaatagtggagtttacaccttcttgtcctctacactgaaatcacttgaggaaaaagatcacatacatagggtgttggataaaatcacggatacactcatacatctgatggcaaaagcaggattgaccctgcaacagcagcacgtgcgactggcccaactgctgttgatccttagccatatcagacacatgtctaacaaaaggatggaacatttgtacagcatgaaatgtaagaacgtagtgccactgtccgatttgttgctggaaatgctggacgctcatcggctc

SEQ ID NO: 81 - protein, 245 aa, Artificial Sequence
  Description of Artificial Sequence: Synthetic Destabilizing Domain (DD)
SLALSLTADQMVSALLDAEPPILYSEYDPTRPFSEASMMGLLTNLADRELVHMINWAKRVPGFVDLTLHDQVHLLECAWMEILMIGLVWRSMEHPGKLLFAPNLLLDRNQGKCVEGGVEIFDMLLATSSRFRMMNLQGEEFVCLKSIILLNSGVYTFLSSTLKSLEEKDHIHRVLDKITDTLIHLMAKAGLTLQQQHSRLAQLLLILSHIRHMSNKRMEHLYSMKCKNVVPLSDLLLEMLDAHRL

SEQ ID NO: 82 - DNA, 735 bp, Artificial Sequence
  Description of Artificial Sequence: Synthetic Destabilizing Domain (DD)
tcactggcgctcagccttactgccgaccaaatggtatcagctcttctggacgcagaacccccaattctttattccgagtacgaccccacacgcccgttcagtgaagcttccatgatgggcctccttacgaaccttgccgaccgggaactcgtgcacatgatcaattgggcgaagcgggtgccggggttcgtagatttgacacttcacgaccaagttcatctcttggaatgtgcttggatggagatattgatgatcggactcgtgtggaggtcaatggagcatcctggtaaacttcttttcgcacccaatctgctcttggatagaaatcagggtaagtgcgtcgagggtggcgttgaaatcttcgacatgctccttgcgacatccagccgattccgaatgatgaatcttcaaggagaggaatttgtctgtcttaagagcattatactcctcaatagtggagtttacaccttcttgtcctctacactgaaatcacttgaggaaaaagatcacatacatagggtgttggataaaatcacggatacactcatacatctgatggcaaaagcaggattgaccctgcaacagcagcacagccgactggcccaactgctgttgatccttagccatatcagacacatgtctaacaaaaggatggaacatttgtacagcatgaaatgtaagaacgtagtgccactgtccgatttgttgctggaaatgctggacgctcatcggctc

SEQ ID NO: 83 - protein, 245 aa, Artificial Sequence
  Description of Artificial Sequence: Synthetic Destabilizing Domain (DD)
SLALSLTADQMVSALLDAEPPILYSEYDPTRPFSEASMMGLLTNLADRELVHMINWAKRVPGFVDLTLHDQVHLLECAWMEILMIGLVWRSMEHPGKLLFAPNLLLDRNQGKCVEGGVEIFDMLLATSSRFRMMNLQGEEFVCLKSIILLNSGVYTFLSSTLKSLEEKDHIHRVLDKITDTLIHLMAKAGLTLQQQHCRLAQLLLILSHIRHMSNKRMEHLYSMKCKNVVPLSDLLLEMLDAHRL

SEQ ID NO: 84 - DNA, 735 bp, Artificial Sequence
  Description of Artificial Sequence: Synthetic Destabilizing Domain (DD)
tcactggcgctcagccttactgccgaccaaatggtatcagctcttctggacgcagaacccccaattctttattccgagtacgaccccacacgcccgttcagtgaagcttccatgatgggcctccttacgaaccttgccgaccgggaactcgtgcacatgatcaattgggcgaagcgggtgccggggttcgtagatttgacacttcacgaccaagttcatctcttggaatgtgcttggatggagatattgatgatcggactcgtgtggaggtcaatggagcatcctggtaaacttcttttcgcacccaatctgctcttggatagaaatcagggtaagtgcgtcgagggtggcgttgaaatcttcgacatgctccttgcgacatccagccgattccgaatgatgaatcttcaaggagaggaatttgtctgtcttaagagcattatactcctcaatagtggagtttacaccttcttgtcctctacactgaaatcacttgaggaaaaagatcacatacatagggtgttggataaaatcacggatacactcatacatctgatggcaaaagcaggattgaccctgcaacagcagcactgccgactggcccaactgctgttgatccttagccatatcagacacatgtctaacaaaaggatggaacatttgtacagcatgaaatgtaagaacgtagtgccactgtccgatttgttgctggaaatgctggacgctcatcggctc

SEQ ID NO: 85 - protein, 245 aa, Artificial Sequence
  Description of Artificial Sequence: Synthetic Destabilizing Domain (DD)
SLALSLTADQMVSALLDAEPPILYSEYDPTRPFSEASMMGLLTNLADRELVHMINWAKRVPGFVDLTLHDQVHLLECAWMEILMIGLVWRSMEHPGKLLFAPNLLLDRNQGKCVEGGVEIFDMLLATSSRFRMMNLQGEEFVCLKSIILLNSGVYTFLSSTLKSLEEKDHIHRVLDKITDTLIHLMAKAGLTLQQQHWRLAQLLLILSHIRHMSNKRMEHLYSMKCKNVVPLSDLLLEMLDAHRL

SEQ ID NO: 86 - DNA, 735 bp, Artificial Sequence
  Description of Artificial Sequence: Synthetic Destabilizing Domain (DD)
tcactggcgctcagccttactgccgaccaaatggtatcagctcttctggacgcagaacccccaattctttattccgagtacgaccccacacgcccgttcagtgaagcttccatgatgggcctccttacgaaccttgccgaccgggaactcgtgcacatgatcaattgggcgaagcgggtgccggggttcgtagatttgacacttcacgaccaagttcatctcttggaatgtgcttggatggagatattgatgatcggactcgtgtggaggtcaatggagcatcctggtaaacttcttttcgcacccaatctgctcttggatagaaatcagggtaagtgcgtcgagggtggcgttgaaatcttcgacatgctccttgcgacatccagccgattccgaatgatgaatcttcaaggagaggaatttgtctgtcttaagagcattatactcctcaatagtggagtttacaccttcttgtcctctacactgaaatcacttgaggaaaaagatcacatacatagggtgttggataaaatcacggatacactcatacatctgatggcaaaagcaggattgaccctgcaacagcagcactggcgactagcccaactgctgttgatccttagccatatcagacacatgtctaacaaaaggatggaacatttgtacagcatgaaatgtaagaacgtagtgccactgtccgatttgttgctggaaatgctggacgctcatcggctc

SEQ ID NO: 87 - protein, 245 aa, Artificial Sequence
  Description of Artificial Sequence: Synthetic Destabilizing Domain (DD)
SLALSLTADQMVSALLDAEPPILYSEYDPTRPFSEASMMGLLTNLADRELVHMINWAKRVPGFVDLTLHDQVHLLECAWMEILMIGLVWRSMEHPGKLLFAPNLLLDRNQGKCVEGGVEIFDMLLATSSRFRMMNLQGEEFVCLKSIILLNSGVYTFLSSTLKSLEEKDHIHRVLDKITDTLIHLMAKAGLTLQQQHPRLAQLLLILSHIRHMSNKRMEHLYSMKCKNVVPLSDLLLEMLDAHRL

SEQ ID NO: 88 - DNA, 735 bp, Artificial Sequence
  Description of Artificial Sequence: Synthetic Destabilizing Domain (DD)
tcactggcgctcagccttactgccgaccaaatggtatcagctcttctggacgcagaacccccaattctttattccgagtacgaccccacacgcccgttcagtgaagcttccatgatgggcctccttacgaaccttgccgaccgggaactcgtgcacatgatcaattgggcgaagcgggtgccggggttcgtagatttgacacttcacgaccaagttcatctcttggaatgtgcttggatggagatattgatgatcggactcgtgtggaggtcaatggagcatcctggtaaacttcttttcgcacccaatctgctcttggatagaaatcagggtaagtgcgtcgagggtggcgttgaaatcttcgacatgctccttgcgacatccagccgattccgaatgatgaatcttcaaggagaggaatttgtctgtcttaagagcattatactcctcaatagtggagtttacaccttcttgtcctctacactgaaatcacttgaggaaaaagatcacatacatagggtgttggataaaatcacggatacactcatacatctgatggcaaaagcaggattgaccctgcaacagcagcacccccgactggcccaactgctgttgatccttagccatatcagacacatgtctaacaaaaggatggaacatttgtacagcatgaaatgtaagaacgtagtgccactgtccgatttgttgctggaaatgctggacgctcatcggctc

SEQ ID NO: 89 - protein, 245 aa, Artificial Sequence
  Description of Artificial Sequence: Synthetic Destabilizing Domain (DD)
SLALSLTADQMVSALLDAEPPILYSEYDPTRPFSEASMMGLLTNLADRELVHMINWAKRVPGFVDLTLHDQVHLLECAWMEILMIGLVWRSMEHPGKLLFAPNLLLDRNQGKCVEGGVEIFDMLLATSSRFRMMNLQGEEFVCLKSIILLNSGVYTFLSSTLKSLEEKDHIHRVLDKITDTLIHLMAKAGLTLQQQHTRLAQLLLILSHIRHMSNKRMEHLYSMKCKNVVPLSDLLLEMLDAHRL

SEQ ID NO: 90 - DNA, 735 bp, Artificial Sequence
  Description of Artificial Sequence: Synthetic Destabilizing Domain (DD)
tcactggcgctcagccttactgccgaccaaatggtatcagctcttctggacgcagaacccccaattctttattccgagtacgaccccacacgcccgttcagtgaagcttccatgatgggcctccttacgaaccttgccgaccgggaactcgtgcacatgatcaattgggcgaagcgggtgccggggttcgtagatttgacacttcacgaccaagttcatctcttggaatgtgcttggatggagatattgatgatcggactcgtgtggaggtcaatggagcatcctggtaaacttcttttcgcacccaatctgctcttggatagaaatcagggtaagtgcgtcgagggtggcgttgaaatcttcgacatgctccttgcgacatccagccgattccgaatgatgaatcttcaaggagaggaatttgtctgtcttaagagcattatactcctcaatagtggagtttacaccttcttgtcctctacactgaaatcacttgaggaaaaagatcacatacatagggtgttggataaaatcacggatacactcatacatctgatggcaaaagcaggattgaccctgcaacagcagcacacccgactggcccaactgctgttgatccttagccatatcagacacatgtctaacaaaaggatggaacatttgtacagcatgaaatgtaagaacgtagtgccactgtccgatttgttgctggaaatgctggacgctcatcggctc

SEQ ID NO: 91 - protein, 245 aa, Artificial Sequence
  Description of Artificial Sequence: Synthetic Destabilizing Domain (DD)
SLALSLTADQMVSALLDAEPPILYSEYDPTRPFSEASMMGLLTNLADRELVHMINWAKRVPGFVDLTLHDQVHLLECAWMEILMIGLVWRSMEHPGKLLFAPNLLLDRNQGKCVEGGVEIFDMLLATSSRFRMMNLQGEEFVCLKSIILLNSGVYTFLSSTLKSLEEKDHIHRVLDKITDTLIHLMAKAGLTLQQQHARLAQLLLILSHIRHMSNKRMEHLYSMKCKNVVPLSDLLLEMLDAHRL

SEQ ID NO: 92 - DNA, 735 bp, Artificial Sequence
  Description of Artificial Sequence: Synthetic Destabilizing Domain (DD)
tcactggcgctcagccttactgccgaccaaatggtatcagctcttctggacgcagaacccccaattctttattccgagtacgaccccacacgcccgttcagtgaagcttccatgatgggcctccttacgaaccttgccgaccgggaactcgtgcacatgatcaattgggcgaagcgggtgccggggttcgtagatttgacacttcacgaccaagttcatctcttggaatgtgcttggatggagatattgatgatcggactcgtgtggaggtcaatggagcatcctggtaaacttcttttcgcacccaatctgctcttggatagaaatcagggtaagtgcgtcgagggtggcgttgaaatcttcgacatgctccttgcgacatccagccgattccgaatgatgaatcttcaaggagaggaatttgtctgtcttaagagcattatactcctcaatagtggagtttacaccttcttgtcctctacactgaaatcacttgaggaaaaagatcacatacatagggtgttggataaaatcacggatacactcatacatctgatggcaaaagcaggattgaccctgcaacagcagcacgcccgactggcccaactgctgttgatccttagccatatcagacacatgtctaacaaaaggatggaacatttgtacagcatgaaatgtaagaacgtagtgccactgtccgatttgttgctggaaatgctggacgctcatcggctc

SEQ ID NO: 93 - protein, 245 aa, Artificial Sequence
  Description of Artificial Sequence: Synthetic Destabilizing Domain (DD)
SLALSLTADQMVSALLDAEPPILYSEYDPTRPFSEASMMGLLTNLADRELVHMINWAKRVPGFVDLTLHDQVHLLECAWMEILMIGLVWRSMEHPGKLLFAPNLLLDRNQGKCVEGGVEIFDMLLATSSRFRMMNLQGEEFVCLKSIILLNSGVYTFLSSTLKSLEEKDHIHRVLDKITDTLIHLMAKAGLTLQQQHDRLAQLLLILSHIRHMSNKRMEHLYSMKCKNVVPLSDLLLEMLDAHRL

SEQ ID NO: 94 - DNA, 735 bp, Artificial Sequence
  Description of Artificial Sequence: Synthetic Destabilizing Domain (DD)
tcactggcgctcagccttactgccgaccaaatggtatcagctcttctggacgcagaacccccaattctttattccgagtacgaccccacacgcccgttcagtgaagcttccatgatgggcctccttacgaaccttgccgaccgggaactcgtgcacatgatcaattgggcgaagcgggtgccggggttcgtagatttgacacttcacgaccaagttcatctcttggaatgtgcttggatggagatattgatgatcggactcgtgtggaggtcaatggagcatcctggtaaacttcttttcgcacccaatctgctcttggatagaaatcagggtaagtgcgtcgagggtggcgttgaaatcttcgacatgctccttgcgacatccagccgattccgaatgatgaatcttcaaggagaggaatttgtctgtcttaagagcattatactcctcaatagtggagtttacaccttcttgtcctctacactgaaatcacttgaggaaaaagatcacatacatagggtgttggataaaatcacggatacactcatacatctgatggcaaaagcaggattgaccctgcaacagcagcacgaccgactggcccaactgctgttgatccttagccatatcagacacatgtctaacaaaaggatggaacatttgtacagcatgaaatgtaagaacgtagtgccactgtccgatttgttgctggaaatgctggacgctcatcggctc

SEQ ID NO: 95 - protein, 245 aa, Artificial Sequence
  Description of Artificial Sequence: Synthetic Destabilizing Domain (DD)
SLALSLTADQMVSALLDAEPPILYSEYDPTRPFSEASMMGLLTNLADRELVHMINWAKRVPGFVDLTLHDQVHLLECAWMEILMIGLVWRSMEHPGKLLFAPNLLLDRNQGKCVEGGVEIFDMLLATSSRFRMMNLQGEEFVCLKSIILLNSGVYTFLSSTLKSLEEKDHIHRVLDKITDTLIHLMAKAGLTLQQQHERLAQLLLILSHIRHMSNKRMEHLYSMKCKNVVPLSDLLLEMLDAHRL

SEQ ID NO: 96 - DNA, 735 bp, Artificial Sequence
  Description of Artificial Sequence: Synthetic Destabilizing Domain (DD)
tcactggcgctcagccttactgccgaccaaatggtatcagctcttctggacgcagaacccccaattctttattccgagtacgaccccacacgcccgttcagtgaagcttccatgatgggcctccttacgaaccttgccgaccgggaactcgtgcacatgatcaattgggcgaagcgggtgccggggttcgtagatttgacacttcacgaccaagttcatctcttggaatgtgcttggatggagatattgatgatcggactcgtgtggaggtcaatggagcatcctggtaaacttcttttcgcacccaatctgctcttggatagaaatcagggtaagtgcgtcgagggtggcgttgaaatcttcgacatgctccttgcgacatccagccgattccgaatgatgaatcttcaaggagaggaatttgtctgtcttaagagcattatactcctcaatagtggagtttacaccttcttgtcctctacactgaaatcacttgaggaaaaagatcacatacatagggtgttggataaaatcacggatacactcatacatctgatggcaaaagcaggattgaccctgcaacagcagcacgagcgactggcccaactgctgttgatccttagccatatcagacacatgtctaacaaaaggatggaacatttgtacagcatgaaatgtaagaacgtagtgccactgtccgatttgttgctggaaatgctggacgctcatcggctc

SEQ ID NO: 97 - protein, 245 aa, Artificial Sequence
  Description of Artificial Sequence: Synthetic Destabilizing Domain (DD)
SLALSLTADQMVSALLDAEPPILYSEYDPTRPFSEASMMGLLTNLADRELVHMINWAKRVPGFVDLTLHDQVHLLECAWMEILMIGLVWRSMEHPGKLLFAPNLLLDRNQGKCVEGGVEIFDMLLATSSRFRMMNLQGEEFVCLKSIILLNSGVYTFLSSTLKSLEEKDHIHRVLDKITDTLIHLMAKAGLTLQQQHGRLAQLLLILSHIRHMSNKRMEHLYSMKCKNVVPLSDLLLEMLDAHRL

SEQ ID NO: 98 - DNA, 735 bp, Artificial Sequence
  Description of Artificial Sequence: Synthetic Destabilizing Domain (DD)
tcactggcgctcagccttactgccgaccaaatggtatcagctcttctggacgcagaacccccaattctttattccgagtacgaccccacacgcccgttcagtgaagcttccatgatgggcctccttacgaaccttgccgaccgggaactcgtgcacatgatcaattgggcgaagcgggtgccggggttcgtagatttgacacttcacgaccaagttcatctcttggaatgtgcttggatggagatattgatgatcggactcgtgtggaggtcaatggagcatcctggtaaacttcttttcgcgcccaatctgctcttggatagaaatcagggtaagtgcgtcgagggtggcgttgaaatcttcgacatgctccttgcgacatccagccgattccgaatgatgaatcttcaaggagaggaatttgtctgtcttaagagcattatactcctcaatagtggagtttacaccttcttgtcctctacactgaaatcacttgaggaaaaagatcacatacatagggtgttggataaaatcacggatacactcatacatctgatggcaaaagcaggattgaccctgcaacagcagcacggccgactggcccaactgctgttgatccttagccatatcagacacatgtctaacaaaaggatggaacatttgtacagcatgaaatgtaagaacgtagtgccactgtccgatttgttgctggaaatgctggacgctcatcggctc

SEQ ID NO: 99 - protein, 21 aa, Artificial Sequence
  Description of Artificial Sequence: Synthetic Signal Sequence
MALPVTALLLPLALLLHAARP

SEQ ID NO: 100 - DNA, 63 bp, Artificial Sequence
  Description of Artificial Sequence: Synthetic Signal Sequence
atggccttaccagtgaccgccttgctcctgccgctggccttgctgctccacgccgccaggccg

SEQ ID NO: 101 - protein, 22 aa, Artificial Sequence
  Description of Artificial Sequence: Synthetic Signal Sequence
MCHQQLVISWFSLVFLASPLVA

SEQ ID NO: 102 - DNA, 66 bp, Artificial Sequence
  Description of Artificial Sequence: Synthetic Signal Sequence
atgtgccaccaacagctcgtgatcagctggttctccctggtgttcctggctagccccctggtggcc

SEQ ID NO: 103 - protein, 242 aa, Artificial Sequence
  Description of Artificial Sequence: Synthetic Payload sequence
DIQMTQTTSSLSASLGDRVTISCRASQDISKYLNWYQQKPDGTVKLLIYHTSRLHSGVPSRFSGSGSGTDYSLTISNLEQEDIATYFCQQGNTLPYTFGGGTKLEITGGGGSGGGGSGGGGSEVKLQESGPGLVAPSQSLSVTCTVSGVSLPDYGVSWIRQPPRKGLEWLGVIWGSETTYYNSALKSRLTIIKDNSKSQVFLKMNSLQTDDTAIYYCAKHYYYGGSYAMDYWGQGTSVTVSS

SEQ ID NO: 104 - DNA, 726 bp, Artificial Sequence
  Description of Artificial Sequence: Synthetic Payload sequence
gacatccagatgacacagactacatcctccctgtctgcctctctgggagacagagtcaccatcagttgcagggcaagtcaggacattagtaaatatttaaattggtatcagcagaaaccagatggaactgttaaactcctgatctaccatacatcaagattacactcaggagtcccatcaaggttcagtggcagtgggtctggaacagattattctctcaccattagcaacctggagcaagaagatattgccacttacttttgccaacagggtaatacgcttccgtacacgttcggaggggggaccaagctggagatcacaggtggcggtggctcgggcggtggtgggtcgggtggcggcggatctgaggtgaaactgcaggagtcaggacctggcctggtggcgccctcacagagcctgtccgtcacatgcactgtctcaggggtctcattacccgactatggtgtaagctggattcgccagcctccacgaaagggtctggagtggctgggagtaatatggggtagtgaaaccacatactataattcagctctcaaatccagactgaccatcatcaaggacaactccaagagccaagttttcttaaaaatgaacagtctgcaaactgatgacacagccatttactactgtgccaaacattattactacggtggtagctatgctatggactactggggccaaggaacctcagtcaccgtctcctca

SEQ ID NO: 105 - protein, 69 aa, Artificial Sequence
  Description of Artificial Sequence: Synthetic Payload sequence
TTTPAPRPPTPAPTIASQPLSLRPEACRPAAGGAVHTRGLDFACDIYIWAPLAGTCGVLLLSLVITLYC

SEQ ID NO: 106 - DNA, 207 bp, Artificial Sequence
  Description of Artificial Sequence: Synthetic Payload sequence
accacgacgccagcgccgcgaccaccaacaccggcgcccaccatcgcgtcgcagcccctgtccctgcgcccagaggcgtgccggccagcggcggggggcgcagtgcacacgagggggctggacttcgcctgtgatatctacatctgggcgcccttggccgggacttgtggggtccttctcctgtcactggttatcaccctttactgc

SEQ ID NO: 107 - protein, 42 aa, Artificial Sequence
  Description of Artificial Sequence: Synthetic Payload sequence
KRGRKKLLYIFKQPFMRPVQTTQEEDGCSCRFPEEEEGGCEL

SEQ ID NO: 108 - DNA, 126 bp, Artificial Sequence
  Description of Artificial Sequence: Synthetic Payload sequence
aaacggggcagaaagaaactcctgtatatattcaaacaaccatttatgagaccagtacaaactactcaagaggaagatggctgtagctgccgatttccagaagaagaagaaggaggatgtgaactg

SEQ ID NO: 109 - protein, 112 aa, Artificial Sequence
  Description of Artificial Sequence: Synthetic Payload sequence
RVKFSRSADAPAYKQGQNQLYNELNLGRREEYDVLDKRRGRDPEMGGKPRRKNPQEGLYNELQKDKMAEAYSEIGMKGERRRGKGHDGLYQGLSTATKDTYDALHMQALPPR

SEQ ID NO: 110 - DNA, 336 bp, Artificial Sequence
  Description of Artificial Sequence: Synthetic Payload sequence
agagtgaagttcagcaggagcgcagacgcccccgcgtacaagcagggccagaaccagctctataacgagctcaatctaggacgaagagaggagtacgatgttttggacaagagacgtggccgggaccctgagatggggggaaagccgagaaggaagaaccctcaggaaggcctgtacaatgaactgcagaaagataagatggcggaggcctacagtgagattgggatgaaaggcgagcgccggaggggcaaggggcacgatggcctttaccagggtctcagtacagccaccaaggacacctacgacgcccttcacatgcaggccctgccccctcgc

SEQ ID NO: 111 - protein, 306 aa, Artificial Sequence
  Description of Artificial Sequence: Synthetic Payload sequence
IWELKKDVYVVELDWYPDAPGEMVVLTCDTPEEDGITWTLDQSSEVLGSGKTLTIQVKEFGDAGQYTCHKGGEVLSHSLLLLHKKEDGIWSTDILKDQKEPKNKTFLRCEAKNYSGRFTCWWLTTISTDLTFSVKSSRGSSDPQGVTCGAATLSAERVRGDNKEYEYSVECQEDSACPAAEESLPIEVMVDAVHKLKYENYTSSFFIRDIIKPDPPKNLQLKPLKNSRQVEVSWEYPDTWSTPHSYFSLTFCVQVQGKSKREKKDRVFTDKTSATVICRKNASISVRAQDRYYSSSWSEWASVPCS

SEQ ID NO: 112 - DNA, 918 bp, Artificial Sequence
  Description of Artificial Sequence: Synthetic Payload sequence
atctgggagctcaagaaagacgtgtacgtggtggaactggactggtaccccgacgcccctggcgaaatggtggtgctgacatgcgacacccctgaggaggatggcattacctggaccctcgatcagagctccgaggtgctgggcagcggcaaaaccctgaccatccaggtgaaggagtttggcgatgccggccagtacacatgtcacaagggcggcgaggtgctgagccactccctgctgctgctccacaagaaggaagatggcatctggagcaccgacattctgaaggatcagaaggagcccaagaacaagacattcctgaggtgtgaggccaagaactacagcggcaggtttacctgctggtggctgacaacaatcagcaccgacctcacattctccgtcaagtcctccaggggttcttccgaccctcaaggcgtgacatgcggcgctgccaccctgagcgctgagagagtcaggggcgacaacaaggagtacgagtacagcgtcgaatgtcaggaggacagcgcctgtcccgccgctgaagagagcctgcctatcgaggtgatggtggacgccgtgcacaaactgaagtatgagaattacacctccagcttcttcatcagggacatcatcaaacccgatccccccaagaacctgcagctgaagcctctgaagaacagcagacaggtcgaagtgtcctgggagtaccctgatacctggtccacaccccacagctacttcagcctgaccttttgcgtgcaggtgcagggcaagagcaaaagggagaagaaggacagggtgtttaccgacaagacctccgccacagtgatttgcagaaagaacgcctccatcagcgtgagggcccaggacaggtattacagcagctcctggagcgaatgggctagcgtgccctgtagc

SEQ ID NO: 113 - protein, 197 aa, Artificial Sequence
  Description of Artificial Sequence: Synthetic Payload sequence
RNLPVATPDPGMFPCLHHSQNLLRAVSNMLQKARQTLEFYPCTSEEIDHEDITKDKTSTVEACLPLELTKNESCLNSRETSFITNGSCLASRKTSFMMALCLSSIYEDLKMYQVEFKTMNAKLLMDPKRQIFLDQNMLAVIDELMQALNFNSETVPQKSSLEEPDFYKTKIKLCILLHAFRIRAVTIDRVMSYLNAS

SEQ ID NO: 114 - DNA, 591 bp, Artificial Sequence
  Description of Artificial Sequence: Synthetic Payload sequence
agaaacctgcctgtcgctacccccgaccccggaatgttcccctgcctgcaccactcccagaacctcctgagggccgtgtccaacatgctgcagaaggctagacagaccctcgaattctacccctgtaccagcgaggagatcgaccatgaggacatcaccaaggataagaccagcaccgtggaggcttgcctgcctctggagctgaccaaaaacgagagctgcctgaacagcagggaaaccagcttcattaccaacggctcctgcctggcctccaggaagacatccttcatgatggccctgtgcctcagcagcatctacgaggacctgaagatgtatcaggtggagtttaagaccatgaatgccaagctgctgatggaccctaagaggcagatcttcctggaccagaatatgctggccgtgattgacgagctgatgcaggccctcaactttaacagcgagaccgtgccccagaaaagcagcctcgaagagcctgacttctacaaaaccaagattaagctgtgtatcctgctgcacgccttcaggatcagggccgtgaccatcgacagggtgatgagctacctgaacgccagc

SEQ ID NO: 115 - DNA, 591 bp, Artificial Sequence
  Description of Artificial Sequence: Synthetic Payload sequence
agaaacctgcctgtcgctacccccgaccccggaatgttcccctgcctgcaccactcccagaacctcctgagggccgtgtccaacatgctgcagaaggctagacagaccctcgaattctacccctgtaccagcgaggagatcgaccatgaggacatcaccaaggataagaccagcaccgtggaggcttgcctgcctctggagctgaccaaaaacgagagctgcctgaacagcagggaaaccagcttcattaccaacggctcctgcctggcctccaggaagacatccttcatgatggccctgtgcctcagcagcatctacgaggacctgaagatgtatcaggtggagtttaagaccatgaatgccaagctgctgatggaccctaagaggcagatcttcctggaccagaatatgctggccgtgattgacgagctgatgcaggccctcaactttaacagcgagaccgtgccccagaaaagcagcctcgaagagcctgacttctacaaaaccaagattaagctgtgtatcctgctgcacgccttcaggatcagggccgtgaccatcgacagggtgatgagctacctgaacgcctcc

SEQ ID NO: 116 - protein, 4 aa, Artificial Sequence
  Description of Artificial Sequence: Synthetic Cleavage site sequence
RTKR

SEQ ID NO: 117 - DNA, 12 bp, Artificial Sequence
  Description of Artificial Sequence: Synthetic Cleavage site sequence
agaacgaagaga

SEQ ID NO: 118 - protein, 12 aa, Artificial Sequence
  Description of Artificial Sequence: Synthetic Cleavage site sequence
ESRRVRRNKRSK

SEQ ID NO: 119 - DNA, 36 bp, Artificial Sequence
  Description of Artificial Sequence: Synthetic Cleavage site sequence
gagtccaggagagtgcggcgcaacaagaggagcaag

SEQ ID NO: 120 - protein, 19 aa, Artificial Sequence
  Description of Artificial Sequence: Synthetic Cleavage site sequence
ATNFSLLKQAGDVEENPGP

SEQ ID NO: 121 - DNA, 57 bp, Artificial Sequence
  Description of Artificial Sequence: Synthetic Cleavage site sequence
gctactaacttcagcctgctgaagcaggctggagacgtggaggagaaccctggacct

SEQ ID NO: 122 - DNA, 11 bp, Artificial Sequence
  Description of Artificial Sequence: Synthetic Spacer
atcgggctagc

SEQ ID NO: 123 - DNA, 32 bp, Artificial Sequence
  Description of Artificial Sequence: Synthetic Spacer
gcttgccacaacccacaaggagacgaccttcc

SEQ ID NO: 124 - DNA, 576 bp, Artificial Sequence
  Description of Artificial Sequence: Synthetic Spacer
cgcccctctccctcccccccccctaacgttactggccgaagccgcttggaataaggccggtgtgcgtttgtctatatgttattttccaccatattgccgtcttttggcaatgtgagggcccggaaacctggccctgtcttcttgacgagcattcctaggggtctttcccctctcgccaaaggaatgcaaggtctgttgaatgtcgtgaaggaagcagttcctctggaagcttcttgaagacaaacaacgtctgtagcgaccctttgcaggcagcggaaccccccacctggcgacaggtgcctctgcggccaaaagccacgtgtataagatacacctgcaaaggcggcacaaccccagtgccacgttgtgagttggatagttgtggaaagagtcaaatggctctcctcaagcgtattcaacaaggggctgaaggatgcccagaaggtaccccattgtatgggatctgatctggggcctcggtgcacatgctttacatgtgtttagtcgaggttaaaaaaacgtctaggccccccgaaccacggggacgtggttttcctttgaaaaacacgatgataa

SEQ ID NO: 125 - protein, 15 aa, Artificial Sequence
  Description of Artificial Sequence: Synthetic Linker
GGGGSGGGGSGGGGS

SEQ ID NO: 126 - DNA, 45 bp, Artificial Sequence
  Description of Artificial Sequence: Synthetic Linker
ggaggaggaggcagcggaggaggaggttctggaggaggcggcagc

SEQ ID NO: 127 - DNA, 4444 bp, Artificial Sequence
  Description of Artificial Sequence: Synthetic Construct
atggccttaccagtgaccgccttgctcctgccgctggccttgctgctccacgccgccaggccggacatccagatgacacagactacatcctccctgtctgcctctctgggagacagagtcaccatcagttgcagggcaagtcaggacattagtaaatatttaaattggtatcagcagaaaccagatggaactgttaaactcctgatctaccatacatcaagattacactcaggagtcccatcaaggttcagtggcagtgggtctggaacagattattctctcaccattagcaacctggagcaagaagatattgccacttacttttgccaacagggtaatacgcttccgtacacgttcggaggggggaccaagctggagatcacaggtggcggtggctcgggcggtggtgggtcgggtggcggcggatctgaggtgaaactgcaggagtcaggacctggcctggtggcgccctcacagagcctgtccgtcacatgcactgtctcaggggtctcattacccgactatggtgtaagctggattcgccagcctccacgaaagggtctggagtggctgggagtaatatggggtagtgaaaccacatactataattcagctctcaaatccagactgaccatcatcaaggacaactccaagagccaagttttcttaaaaatgaacagtctgcaaactgatgacacagccatttactactgtgccaaacattattactacggtggtagctatgctatggactactggggccaaggaacctcagtcaccgtctcctcaaccacgacgccagcgccgcgaccaccaacaccggcgcccaccatcgcgtcgcagcccctgtccctgcgcccagaggcgtgccggccagcggcggggggcgcagtgcacacgagggggctggacttcgcctgtgatatctacatctgggcgcccttggccgggacttgtggggtccttctcctgtcactggttatcaccctttactgcaaacggggcagaaagaaactcctgtatatattcaaacaaccatttatgagaccagtacaaactactcaagaggaagatggctgtagctgccgatttccagaagaagaagaaggaggatgtgaactgagagtgaagttcagcaggagcgcagacgcccccgcgtacaagcagggccagaaccagctctataacgagctcaatctaggacgaagagaggagtacgatgttttggacaagagacgtggccgggaccctgagatggggggaaagccgagaaggaagaaccctcaggaaggcctgtacaatgaactgcagaaagataagatggcggaggcctacagtgagattgggatgaaaggcgagcgccggaggggcaaggggcacgatggcctttaccagggtctcagtacagccaccaaggacacctacgacgcccttcacatgcaggccctgccccctcgctaaatcgggctagccgcccctctccctcccccccccctaacgttactggccgaagccgcttggaataaggccggtgtgcgtttgtctatatgttattttccaccatattgccgtcttttggcaatgtgagggcccggaaacctggccctgtcttcttgacgagcattcctaggggtctttcccctctcgccaaaggaatgcaaggtctgttgaatgtcgtgaaggaagcagttcctctggaagcttcttgaagacaaacaacgtctgtagcgaccctttgcaggcagcggaaccccccacctggcgacaggtgcctctgcggccaaaagccacgtgtataagatacacctgcaaaggcggcacaaccccagtgccacgttgtgagttggatagttgtggaaagagtcaaatggctctcctcaagcgtattcaacaaggggctgaaggatgcccagaaggtaccccattgtatgggatctgatctggggcctcggtgcacatgctttacatgtgtttagtcgaggttaaaaaaacgtctaggccccccgaaccacggggacgtggttttcctttgaaaaacacgatgataagcttgccacaacccacaaggagacgaccttccatgtgccaccaacagctcgtgatcagctggttctccctggtgttcctggctagccccctggtggccatctgggagctcaagaaagacgtgtacgtggtggaactggactggtaccccgacgcccctggcgaaatggtggtgctgacatgcgacacccctgaggaggatggcattacctggaccctcgatcagagctccgaggtgctgggcagcggcaaaaccctgaccatccaggtgaaggagtttggcgatgccggccagtacacatgtcacaagggcggcgaggtgctgagccactccctgctgctgctccacaagaaggaagatggcatctggagcaccgacattctgaaggatcagaaggagcccaagaacaagacattcctgaggtgtgaggccaagaactacagcggcaggtttacctgctggtggctgacaacaatcagcaccgacctcacattctccgtcaagtcctccaggggttcttccgaccctcaaggcgtgacatgcggcgctgccaccctgagcgctgagagagtcaggggcgacaacaaggagtacgagtacagcgtcgaatgtcaggaggacagcgcctgtcccgccgctgaagagagcctgcctatcgaggtgatggtggacgccgtgcacaaactgaagtatgagaattacacctccagcttcttcatcagggacatcatcaaacccgatccccccaagaacctgcagctgaagcctctgaagaacagcagacaggtcgaagtgtcctgggagtaccctgatacctggtccacaccccacagctacttcagcctgaccttttgcgtgcaggtgcagggcaagagcaaaagggagaagaaggacagggtgtttaccgacaagacctccgccacagtgatttgcagaaagaacgcctccatcagcgtgagggcccaggacaggtattacagcagctcctggagcgaatgggctagcgtgccctgtagcggaggaggaggcagcggaggaggaggttctggaggaggcggcagcagaaacctgcctgtcgctacccccgaccccggaatgttcccctgcctgcaccactcccagaacctcctgagggccgtgtccaacatgctgcagaaggctagacagaccctcgaattctacccctgtaccagcgaggagatcgaccatgaggacatcaccaaggataagaccagcaccgtggaggcttgcctgcctctggagctgaccaaaaacgagagctgcctgaacagcagggaaaccagcttcattaccaacggctcctgcctggcctccaggaagacatccttcatgatggccctgtgcctcagcagcatctacgaggacctgaagatgtatcaggtggagtttaagaccatgaatgccaagctgctgatggaccctaagaggcagatcttcctggaccagaatatgctggccgtgattgacgagctgatgcaggccctcaactttaacagcgagaccgtgccccagaaaagcagcctcgaagagcctgacttctacaaaaccaagattaagctgtgtatcctgctgcacgccttcaggatcagggccgtgaccatcgacagggtgatgagctacctgaacgccagcggatcctcactggcgctcagccttactgccgaccaaatggtatcagctcttctggacgcagaacccccaattctttattccgagtacgaccccacaggcccgttcagtgaagcttccatgatgggcctccttacgaaccttgccgaccgggaactcgtgcacatgatcaattgggcgaagcgggtgccggggttcgtagatttgacacttcacgaccaagttcatctcttggaatgtgcttggatggagatattgatgatcggactcgtgtggaggtcaatggagcatcctggtaaacttcttttcgcacccaatctgctcttggatagaaatcagggtaagtgcgtcgagggtggcgttgaaatcttcgacatgctccttgcgacatccagccgattccgaatgatgaatcttcaaggagaggaatttgtctgtcttaagagcattatactcctcaatagtggagtttacaccttcttgtcctctacactgaaatcacttgaggaaaaagatcacatacatagggtgttggataaaatcacggatacactcatacatctgatggcaaaagcaggattgaccctgcaacagcagcaccaacgactggcccaactgctgttgatccttagccatatcagacacatgtctaacaaaaggatgggacatttgtacagcatgaaatgtaagaacgtagtgccactgtccgatttgttgctggaaatgctggacactcatcggctctaa

SEQ ID NO: 128 - protein, 486 aa, Artificial Sequence
  Description of Artificial Sequence: Synthetic Construct
MALPVTALLLPLALLLHAARPDIQMTQTTSSLSASLGDRVTISCRASQDISKYLNWYQQKPDGTVKLLIYHTSRLHSGVPSRFSGSGSGTDYSLTISNLEQEDIATYFCQQGNTLPYTFGGGTKLEITGGGGSGGGGSGGGGSEVKLQESGPGLVAPSQSLSVTCTVSGVSLPDYGVSWIRQPPRKGLEWLGVIWGSETTYYNSALKSRLTIIKDNSKSQVFLKMNSLQTDDTAIYYCAKHYYYGGSYAMDYWGQGTSVTVSSTTTPAPRPPTPAPTIASQPLSLRPEACRPAAGGAVHTRGLDFACDIYIWAPLAGTCGVLLLSLVITLYCKRGRKKLLYIFKQPFMRPVQTTQEEDGCSCRFPEEEEGGCELRVKFSRSADAPAYKQGQNQLYNELNLGRREEYDVLDKRRGRDPEMGGKPRRKNPQEGLYNELQKDKMAEAYSEIGMKGERRRGKGHDGLYQGLSTATKDTYDALHMQALPPR

SEQ ID NO: 129 - DNA, 1461 bp, Artificial Sequence
  Description of Artificial Sequence: Synthetic Construct
atggccttaccagtgaccgccttgctcctgccgctggccttgctgctccacgccgccaggccggacatccagatgacacagactacatcctccctgtctgcctctctgggagacagagtcaccatcagttgcagggcaagtcaggacattagtaaatatttaaattggtatcagcagaaaccagatggaactgttaaactcctgatctaccatacatcaagattacactcaggagtcccatcaaggttcagtggcagtgggtctggaacagattattctctcaccattagcaacctggagcaagaagatattgccacttacttttgccaacagggtaatacgcttccgtacacgttcggaggggggaccaagctggagatcacaggtggcggtggctcgggcggtggtgggtcgggtggcggcggatctgaggtgaaactgcaggagtcaggacctggcctggtggcgccctcacagagcctgtccgtcacatgcactgtctcaggggtctcattacccgactatggtgtaagctggattcgccagcctccacgaaagggtctggagtggctgggagtaatatggggtagtgaaaccacatactataattcagctctcaaatccagactgaccatcatcaaggacaactccaagagccaagttttcttaaaaatgaacagtctgcaaactgatgacacagccatttactactgtgccaaacattattactacggtggtagctatgctatggactactggggccaaggaacctcagtcaccgtctcctcaaccacgacgccagcgccgcgaccaccaacaccggcgcccaccatcgcgtcgcagcccctgtccctgcgcccagaggcgtgccggccagcggcggggggcgcagtgcacacgagggggctggacttcgcctgtgatatctacatctgggcgcccttggccgggacttgtggggtccttctcctgtcactggttatcaccctttactgcaaacggggcagaaagaaactcctgtatatattcaaacaaccatttatgagaccagtacaaactactcaagaggaagatggctgtagctgccgatttccagaagaagaagaaggaggatgtgaactgagagtgaagttcagcaggagcgcagacgcccccgcgtacaagcagggccagaaccagctctataacgagctcaatctaggacgaagagaggagtacgatgttttggacaagagacgtggccgggaccctgagatggggggaaagccgagaaggaagaaccctcaggaaggcctgtacaatgaactgcagaaagataagatggcggaggcctacagtgagattgggatgaaaggcgagcgccggaggggcaaggggcacgatggcctttaccagggtctcagtacagccaccaaggacacctacgacgcccttcacatgcaggccctgccccctcgctaa

SEQ ID NO: 130 - protein, 787 aa, Artificial Sequence
  Description of Artificial Sequence: Synthetic Construct
MCHQQLVISWFSLVFLASPLVAIWELKKDVYVVELDWYPDAPGEMVVLTCDTPEEDGITWTLDQSSEVLGSGKTLTIQVKEFGDAGQYTCHKGGEVLSHSLLLLHKKEDGIWSTDILKDQKEPKNKTFLRCEAKNYSGRFTCWWLTTISTDLTFSVKSSRGSSDPQGVTCGAATLSAERVRGDNKEYEYSVECQEDSACPAAEESLPIEVMVDAVHKLKYENYTSSFFIRDIIKPDPPKNLQLKPLKNSRQVEVSWEYPDTWSTPHSYFSLTFCVQVQGKSKREKKDRVFTDKTSATVICRKNASISVRAQDRYYSSSWSEWASVPCSGGGGSGGGGSGGGGSRNLPVATPDPGMFPCLHHSQNLLRAVSNMLQKARQTLEFYPCTSEEIDHEDITKDKTSTVEACLPLELTKNESCLNSRETSFITNGSCLASRKTSFMMALCLSSIYEDLKMYQVEFKTMNAKLLMDPKRQIFLDQNMLAVIDELMQALNFNSETVPQKSSLEEPDFYKTKIKLCILLHAFRIRAVTIDRVMSYLNASGSSLALSLTADQMVSALLDAEPPILYSEYDPTGPFSEASMMGLLTNLADRELVHMINWAKRVPGFVDLTLHDQVHLLECAWMEILMIGLVWRSMEHPGKLLFAPNLLLDRNQGKCVEGGVEIFDMLLATSSRFRMMNLQGEEFVCLKSIILLNSGVYTFLSSTLKSLEEKDHIHRVLDKITDTLIHLMAKAGLTLQQQHQRLAQLLLILSHIRHMSNKRMGHLYSMKCKNVVPLSDLLLEMLDTHRL

SEQ ID NO: 131 - DNA, 2364 bp, Artificial Sequence
  Description of Artificial Sequence: Synthetic Construct
atgtgccaccaacagctcgtgatcagctggttctccctggtgttcctggctagccccctggtggccatctgggagctcaagaaagacgtgtacgtggtggaactggactggtaccccgacgcccctggcgaaatggtggtgctgacatgcgacacccctgaggaggatggcattacctggaccctcgatcagagctccgaggtgctgggcagcggcaaaaccctgaccatccaggtgaaggagtttggcgatgccggccagtacacatgtcacaagggcggcgaggtgctgagccactccctgctgctgctccacaagaaggaagatggcatctggagcaccgacattctgaaggatcagaaggagcccaagaacaagacattcctgaggtgtgaggccaagaactacagcggcaggtttacctgctggtggctgacaacaatcagcaccgacctcacattctccgtcaagtcctccaggggttcttccgaccctcaaggcgtgacatgcggcgctgccaccctgagcgctgagagagtcaggggcgacaacaaggagtacgagtacagcgtcgaatgtcaggaggacagcgcctgtcccgccgctgaagagagcctgcctatcgaggtgatggtggacgccgtgcacaaactgaagtatgagaattacacctccagcttcttcatcagggacatcatcaaacccgatccccccaagaacctgcagctgaagcctctgaagaacagcagacaggtcgaagtgtcctgggagtaccctgatacctggtccacaccccacagctacttcagcctgaccttttgcgtgcaggtgcagggcaagagcaaaagggagaagaaggacagggtgtttaccgacaagacctccgccacagtgatttgcagaaagaacgcctccatcagcgtgagggcccaggacaggtattacagcagctcctggagcgaatgggctagcgtgccctgtagcggaggaggaggcagcggaggaggaggttctggaggaggcggcagcagaaacctgcctgtcgctacccccgaccccggaatgttcccctgcctgcaccactcccagaacctcctgagggccgtgtccaacatgctgcagaaggctagacagaccctcgaattctacccctgtaccagcgaggagatcgaccatgaggacatcaccaaggataagaccagcaccgtggaggcttgcctgcctctggagctgaccaaaaacgagagctgcctgaacagcagggaaaccagcttcattaccaacggctcctgcctggcctccaggaagacatccttcatgatggccctgtgcctcagcagcatctacgaggacctgaagatgtatcaggtggagtttaagaccatgaatgccaagctgctgatggaccctaagaggcagatcttcctggaccagaatatgctggccgtgattgacgagctgatgcaggccctcaactttaacagcgagaccgtgccccagaaaagcagcctcgaagagcctgacttctacaaaaccaagattaagctgtgtatcctgctgcacgccttcaggatcagggccgtgaccatcgacagggtgatgagctacctgaacgccagcggatcctcactggcgctcagccttactgccgaccaaatggtatcagctcttctggacgcagaacccccaattctttattccgagtacgaccccacaggcccgttcagtgaagcttccatgatgggcctccttacgaaccttgccgaccgggaactcgtgcacatgatcaattgggcgaagcgggtgccggggttcgtagatttgacacttcacgaccaagttcatctcttggaatgtgcttggatggagatattgatgatcggactcgtgtggaggtcaatggagcatcctggtaaacttcttttcgcacccaatctgctcttggatagaaatcagggtaagtgcgtcgagggtggcgttgaaatcttcgacatgctccttgcgacatccagccgattccgaatgatgaatcttcaaggagaggaatttgtctgtcttaagagcattatactcctcaatagtggagtttacaccttcttgtcctctacactgaaatcacttgaggaaaaagatcacatacatagggtgttggataaaatcacggatacactcatacatctgatggcaaaagcaggattgaccctgcaacagcagcaccaacgactggcccaactgctgttgatccttagccatatcagacacatgtctaacaaaaggatgggacatttgtacagcatgaaatgtaagaacgtagtgccactgtccgatttgttgctggaaatgctggacactcatcggctctaa

SEQ ID NO: 132 - DNA, 4444 bp, Artificial Sequence
  Description of Artificial Sequence: Synthetic Construct
atggccttaccagtgaccgccttgctcctgccgctggccttgctgctccacgccgccaggccggacatccagatgacacagactacatcctccctgtctgcctctctgggagacagagtcaccatcagttgcagggcaagtcaggacattagtaaatatttaaattggtatcagcagaaaccagatggaactgttaaactcctgatctaccatacatcaagattacactcaggagtcccatcaaggttcagtggcagtgggtctggaacagattattctctcaccattagcaacctggagcaagaagatattgccacttacttttgccaacagggtaatacgcttccgtacacgttcggaggggggaccaagctggagatcacaggtggcggtggctcgggcggtggtgggtcgggtggcggcggatctgaggtgaaactgcaggagtcaggacctggcctggtggcgccctcacagagcctgtccgtcacatgcactgtctcaggggtctcattacccgactatggtgtaagctggattcgccagcctccacgaaagggtctggagtggctgggagtaatatggggtagtgaaaccacatactataattcagctctcaaatccagactgaccatcatcaaggacaactccaagagccaagttttcttaaaaatgaacagtctgcaaactgatgacacagccatttactactgtgccaaacattattactacggtggtagctatgctatggactactggggccaaggaacctcagtcaccgtctcctcaaccacgacgccagcgccgcgaccaccaacaccggcgcccaccatcgcgtcgcagcccctgtccctgcgcccagaggcgtgccggccagcggcggggggcgcagtgcacacgagggggctggacttcgcctgtgatatctacatctgggcgcccttggccgggacttgtggggtccttctcctgtcactggttatcaccctttactgcaaacggggcagaaagaaactcctgtatatattcaaacaaccatttatgagaccagtacaaactactcaagaggaagatggctgtagctgccgatttccagaagaagaagaaggaggatgtgaactgagagtgaagttcagcaggagcgcagacgcccccgcgtacaagcagggccagaaccagctctataacgagctcaatctaggacgaagagaggagtacgatgttttggacaagagacgtggccgggaccctgagatggggggaaagccgagaaggaagaaccctcaggaaggcctgtacaatgaactgcagaaagataagatggcggaggcctacagtgagattgggatgaaaggcgagcgccggaggggcaaggggcacgatggcctttaccagggtctcagtacagccaccaaggacacctacgacgcccttcacatgcaggccctgccccctcgctaaatcgggctagccgcccctctccctcccccccccctaacgttactggccgaagccgcttggaataaggccggtgtgcgtttgtctatatgttattttccaccatattgccgtcttttggcaatgtgagggcccggaaacctggccctgtcttcttgacgagcattcctaggggtctttcccctctcgccaaaggaatgcaaggtctgttgaatgtcgtgaaggaagcagttcctctggaagcttcttgaagacaaacaacgtctgtagcgaccctttgcaggcagcggaaccccccacctggcgacaggtgcctctgcggccaaaagccacgtgtataagatacacctgcaaaggcggcacaaccccagtgccacgttgtgagttggatagttgtggaaagagtcaaatggctctcctcaagcgtattcaacaaggggctgaaggatgcccagaaggtaccccattgtatgggatctgatctggggcctcggtgcacatgctttacatgtgtttagtcgaggttaaaaaaacgtctaggccccccgaaccacggggacgtggttttcctttgaaaaacacgatgataagcttgccacaacccacaaggagacgaccttccatgtgccaccaacagctcgtgatcagctggttctccctggtgttcctggctagccccctggtggccatctgggagctcaagaaagacgtgtacgtggtggaactggactggtaccccgacgcccctggcgaaatggtggtgctgacatgcgacacccctgaggaggatggcattacctggaccctcgatcagagctccgaggtgctgggcagcggcaaaaccctgaccatccaggtgaaggagtttggcgatgccggccagtacacatgtcacaagggcggcgaggtgctgagccactccctgctgctgctccacaagaaggaagatggcatctggagcaccgacattctgaaggatcagaaggagcccaagaacaagacattcctgaggtgtgaggccaagaactacagcggcaggtttacctgctggtggctgacaacaatcagcaccgacctcacattctccgtcaagtcctccaggggttcttccgaccctcaaggcgtgacatgcggcgctgccaccctgagcgctgagagagtcaggggcgacaacaaggagtacgagtacagcgtcgaatgtcaggaggacagcgcctgtcccgccgctgaagagagcctgcctatcgaggtgatggtggacgccgtgcacaaactgaagtatgagaattacacctccagcttcttcatcagggacatcatcaaacccgatccccccaagaacctgcagctgaagcctctgaagaacagcagacaggtcgaagtgtcctgggagtaccctgatacctggtccacaccccacagctacttcagcctgaccttttgcgtgcaggtgcagggcaagagcaaaagggagaagaaggacagggtgtttaccgacaagacctccgccacagtgatttgcagaaagaacgcctccatcagcgtgagggcccaggacaggtattacagcagctcctggagcgaatgggctagcgtgccctgtagcggaggaggaggcagcggaggaggaggttctggaggaggcggcagcagaaacctgcctgtcgctacccccgaccccggaatgttcccctgcctgcaccactcccagaacctcctgagggccgtgtccaacatgctgcagaaggctagacagaccctcgaattctacccctgtaccagcgaggagatcgaccatgaggacatcaccaaggataagaccagcaccgtggaggcttgcctgcctctggagctgaccaaaaacgagagctgcctgaacagcagggaaaccagcttcattaccaacggctcctgcctggcctccaggaagacatccttcatgatggccctgtgcctcagcagcatctacgaggacctgaagatgtatcaggtggagtttaagaccatgaatgccaagctgctgatggaccctaagaggcagatcttcctggaccagaatatgctggccgtgattgacgagctgatgcaggccctcaactttaacagcgagaccgtgccccagaaaagcagcctcgaagagcctgacttctacaaaaccaagattaagctgtgtatcctgctgcacgccttcaggatcagggccgtgaccatcgacagggtgatgagctacctgaacgccagcggatcctcactggcgctcagccttactgccgaccaaatggtatcagctcttctggacgcagaacccccaattctttattccgagtacgaccccacacgcccgttcagtgaagcttccatgatgggcctccttacgaaccttgccgaccgggaactcgtgcacatgatcaattgggcgaagcgggtgccggggttcgtagatttgacacttcacgaccaagttcatctcttggaatgtgcttggatggagatattgatgatcggactcgtgtggaggtcaatggagcatcctggtaaacttcttttcgcacccaatctgctcttggatagaaatcagggtaagtgcgtcgagggtggcgttgaaatcttcgacatgctccttgcgatatccagccgattccgaatgatgaatcttcaaggagaggaatttgtctgtcttaagagcattatactcctcaatagtggagtttacaccttcttgtcctctacactgaaatcacttgaggaaaaagatcacatacatagggtgttggataaaatcacggatacactcatacatctgatggcaaaagcaggattgaccctgcaacagcagcaccaacgactggcccaactgctgttgatccttagccatatcagacacatgtctaacaaaaggatggaacatttgtacagcatgaaatgtaagaacgtagtgccactgtccgatttgttgctggaaatgctggacgctcatcggctctaa

SEQ ID NO: 133 - protein, 787 aa, Artificial Sequence
  Description of Artificial Sequence: Synthetic Construct
MCHQQLVISWFSLVFLASPLVAIWELKKDVYVVELDWYPDAPGEMVVLTCDTPEEDGITWTLDQSSEVLGSGKTLTIQVKEFGDAGQYTCHKGGEVLSHSLLLLHKKEDGIWSTDILKDQKEPKNKTFLRCEAKNYSGRFTCWWLTTISTDLTFSVKSSRGSSDPQGVTCGAATLSAERVRGDNKEYEYSVECQEDSACPAAEESLPIEVMVDAVHKLKYENYTSSFFIRDIIKPDPPKNLQLKPLKNSRQVEVSWEYPDTWSTPHSYFSLTFCVQVQGKSKREKKDRVFTDKTSATVICRKNASISVRAQDRYYSSSWSEWASVPCSGGGGSGGGGSGGGGSRNLPVATPDPGMFPCLHHSQNLLRAVSNMLQKARQTLEFYPCTSEEIDHEDITKDKTSTVEACLPLELTKNESCLNSRETSFITNGSCLASRKTSFMMALCLSSIYEDLKMYQVEFKTMNAKLLMDPKRQIFLDQNMLAVIDELMQALNFNSETVPQKSSLEEPDFYKTKIKLCILLHAFRIRAVTIDRVMSYLNASGSSLALSLTADQMVSALLDAEPPILYSEYDPTRPFSEASMMGLLTNLADRELVHMINWAKRVPGFVDLTLHDQVHLLECAWMEILMIGLVWRSMEHPGKLLFAPNLLLDRNQGKCVEGGVEIFDMLLAISSRFRMMNLQGEEFVCLKSIILLNSGVYTFLSSTLKSLEEKDHIHRVLDKITDTLIHLMAKAGLTLQQQHQRLAQLLLILSHIRHMSNKRMEHLYSMKCKNVVPLSDLLLEMLDAHRL

SEQ ID NO: 134 - DNA, 2364 bp, Artificial Sequence
  Description of Artificial Sequence: Synthetic Construct
atgtgccaccaacagctcgtgatcagctggttctccctggtgttcctggctagccccctggtggccatctgggagctcaagaaagacgtgtacgtggtggaactggactggtaccccgacgcccctggcgaaatggtggtgctgacatgcgacacccctgaggaggatggcattacctggaccctcgatcagagctccgaggtgctgggcagcggcaaaaccctgaccatccaggtgaaggagtttggcgatgccggccagtacacatgtcacaagggcggcgaggtgctgagccactccctgctgctgctccacaagaaggaagatggcatctggagcaccgacattctgaaggatcagaaggagcccaagaacaagacattcctgaggtgtgaggccaagaactacagcggcaggtttacctgctggtggctgacaacaatcagcaccgacctcacattctccgtcaagtcctccaggggttcttccgaccctcaaggcgtgacatgcggcgctgccaccctgagcgctgagagagtcaggggcgacaacaaggagtacgagtacagcgtcgaatgtcaggaggacagcgcctgtcccgccgctgaagagagcctgcctatcgaggtgatggtggacgccgtgcacaaactgaagtatgagaattacacctccagcttcttcatcagggacatcatcaaacccgatccccccaagaacctgcagctgaagcctctgaagaacagcagacaggtcgaagtgtcctgggagtaccctgatacctggtccacaccccacagctacttcagcctgaccttttgcgtgcaggtgcagggcaagagcaaaagggagaagaaggacagggtgtttaccgacaagacctccgccacagtgatttgcagaaagaacgcctccatcagcgtgagggcccaggacaggtattacagcagctcctggagcgaatgggctagcgtgccctgtagcggaggaggaggcagcggaggaggaggttctggaggaggcggcagcagaaacctgcctgtcgctacccccgaccccggaatgttcccctgcctgcaccactcccagaacctcctgagggccgtgtccaacatgctgcagaaggctagacagaccctcgaattctacccctgtaccagcgaggagatcgaccatgaggacatcaccaaggataagaccagcaccgtggaggcttgcctgcctctggagctgaccaaaaacgagagctgcctgaacagcagggaaaccagcttcattaccaacggctcctgcctggcctccaggaagacatccttcatgatggccctgtgcctcagcagcatctacgaggacctgaagatgtatcaggtggagtttaagaccatgaatgccaagctgctgatggaccctaagaggcagatcttcctggaccagaatatgctggccgtgattgacgagctgatgcaggccctcaactttaacagcgagaccgtgccccagaaaagcagcctcgaagagcctgacttctacaaaaccaagattaagctgtgtatcctgctgcacgccttcaggatcagggccgtgaccatcgacagggtgatgagctacctgaacgccagcggatcctcactggcgctcagccttactgccgaccaaatggtatcagctcttctggacgcagaacccccaattctttattccgagtacgaccccacacgcccgttcagtgaagcttccatgatgggcctccttacgaaccttgccgaccgggaactcgtgcacatgatcaattgggcgaagcgggtgccggggttcgtagatttgacacttcacgaccaagttcatctcttggaatgtgcttggatggagatattgatgatcggactcgtgtggaggtcaatggagcatcctggtaaacttcttttcgcacccaatctgctcttggatagaaatcagggtaagtgcgtcgagggtggcgttgaaatcttcgacatgctccttgcgatatccagccgattccgaatgatgaatcttcaaggagaggaatttgtctgtcttaagagcattatactcctcaatagtggagtttacaccttcttgtcctctacactgaaatcacttgaggaaaaagatcacatacatagggtgttggataaaatcacggatacactcatacatctgatggcaaaagcaggattgaccctgcaacagcagcaccaacgactggcccaactgctgttgatccttagccatatcagacacatgtctaacaaaaggatggaacatttgtacagcatgaaatgtaagaacgtagtgccactgtccgatttgttgctggaaatgctggacgctcatcggctctaa

SEQ ID NO: 135 - DNA, 4444 bp, Artificial Sequence
  Description of Artificial Sequence: Synthetic Construct
atggccttaccagtgaccgccttgctcctgccgctggccttgctgctccacgccgccaggccggacatccagatgacacagactacatcctccctgtctgcctctctgggagacagagtcaccatcagttgcagggcaagtcaggacattagtaaatatttaaattggtatcagcagaaaccagatggaactgttaaactcctgatctaccatacatcaagattacactcaggagtcccatcaaggttcagtggcagtgggtctggaacagattattctctcaccattagcaacctggagcaagaagatattgccacttacttttgccaacagggtaatacgcttccgtacacgttcggaggggggaccaagctggagatcacaggtggcggtggctcgggcggtggtgggtcgggtggcggcggatctgaggtgaaactgcaggagtcaggacctggcctggtggcgccctcacagagcctgtccgtcacatgcactgtctcaggggtctcattacccgactatggtgtaagctggattcgccagcctccacgaaagggtctggagtggctgggagtaatatggggtagtgaaaccacatactataattcagctctcaaatccagactgaccatcatcaaggacaactccaagagccaagttttcttaaaaatgaacagtctgcaaactgatgacacagccatttactactgtgccaaacattattactacggtggtagctatgctatggactactggggccaaggaacctcagtcaccgtctcctcaaccacgacgccagcgccgcgaccaccaacaccggcgcccaccatcgcgtcgcagcccctgtccctgcgcccagaggcgtgccggccagcggcggggggcgcagtgcacacgagggggctggacttcgcctgtgatatctacatctgggcgcccttggccgggacttgtggggtccttctcctgtcactggttatcaccctttactgcaaacggggcagaaagaaactcctgtatatattcaaacaaccatttatgagaccagtacaaactactcaagaggaagatggctgtagctgccgatttccagaagaagaagaaggaggatgtgaactgagagtgaagttcagcaggagcgcagacgcccccgcgtacaagcagggccagaaccagctctataacgagctcaatctaggacgaagagaggagtacgatgttttggacaagagacgtggccgggaccctgagatggggggaaagccgagaaggaagaaccctcaggaaggcctgtacaatgaactgcagaaagataagatggcggaggcctacagtgagattgggatgaaaggcgagcgccggaggggcaaggggcacgatggcctttaccagggtctcagtacagccaccaaggacacctacgacgcccttcacatgcaggccctgccccctcgctaaatcgggctagccgcccctctccctcccccccccctaacgttactggccgaagccgcttggaataaggccggtgtgcgtttgtctatatgttattttccaccatattgccgtcttttggcaatgtgagggcccggaaacctggccctgtcttcttgacgagcattcctaggggtctttcccctctcgccaaaggaatgcaaggtctgttgaatgtcgtgaaggaagcagttcctctggaagcttcttgaagacaaacaacgtctgtagcgaccctttgcaggcagcggaaccccccacctggcgacaggtgcctctgcggccaaaagccacgtgtataagatacacctgcaaaggcggcacaaccccagtgccacgttgtgagttggatagttgtggaaagagtcaaatggctctcctcaagcgtattcaacaaggggctgaaggatgcccagaaggtaccccattgtatgggatctgatctggggcctcggtgcacatgctttacatgtgtttagtcgaggttaaaaaaacgtctaggccccccgaaccacggggacgtggttttcctttgaaaaacacgatgataagcttgccacaacccacaaggagacgaccttccatgtgccaccaacagctcgtgatcagctggttctccctggtgttcctggctagccccctggtggccatctgggagctcaagaaagacgtgtacgtggtggaactggactggtaccccgacgcccctggcgaaatggtggtgctgacatgcgacacccctgaggaggatggcattacctggaccctcgatcagagctccgaggtgctgggcagcggcaaaaccctgaccatccaggtgaaggagtttggcgatgccggccagtacacatgtcacaagggcggcgaggtgctgagccactccctgctgctgctccacaagaaggaagatggcatctggagcaccgacattctgaaggatcagaaggagcccaagaacaagacattcctgaggtgtgaggccaagaactacagcggcaggtttacctgctggtggctgacaacaatcagcaccgacctcacattctccgtcaagtcctccaggggttcttccgaccctcaaggcgtgacatgcggcgctgccaccctgagcgctgagagagtcaggggcgacaacaaggagtacgagtacagcgtcgaatgtcaggaggacagcgcctgtcccgccgctgaagagagcctgcctatcgaggtgatggtggacgccgtgcacaaactgaagtatgagaattacacctccagcttcttcatcagggacatcatcaaacccgatccccccaagaacctgcagctgaagcctctgaagaacagcagacaggtcgaagtgtcctgggagtaccctgatacctggtccacaccccacagctacttcagcctgaccttttgcgtgcaggtgcagggcaagagcaaaagggagaagaaggacagggtgtttaccgacaagacctccgccacagtgatttgcagaaagaacgcctccatcagcgtgagggcccaggacaggtattacagcagctcctggagcgaatgggctagcgtgccctgtagcggaggaggaggcagcggaggaggaggttctggaggaggcggcagcagaaacctgcctgtcgctacccccgaccccggaatgttcccctgcctgcaccactcccagaacctcctgagggccgtgtccaacatgctgcagaaggctagacagaccctcgaattctacccctgtaccagcgaggagatcgaccatgaggacatcaccaaggataagaccagcaccgtggaggcttgcctgcctctggagctgaccaaaaacgagagctgcctgaacagcagggaaaccagcttcattaccaacggctcctgcctggcctccaggaagacatccttcatgatggccctgtgcctcagcagcatctacgaggacctgaagatgtatcaggtggagtttaagaccatgaatgccaagctgctgatggaccctaagaggcagatcttcctggaccagaatatgctggccgtgattgacgagctgatgcaggccctcaactttaacagcgagaccgtgccccagaaaagcagcctcgaagagcctgacttctacaaaaccaagattaagctgtgtatcctgctgcacgccttcaggatcagggccgtgaccatcgacagggtgatgagctacctgaacgccagcggatcctcactggcgctcagccttactgccgaccaaatggtatcagctcttctggacgcagaacccccaattctttattccgagtacgaccccacacgcccgttcagtgaagcttccatgatgggcctccttacgaaccttgccgaccgggaactcgtgcacatgatcaattgggcgaagcgggtgccggggttcgtagatttgacacttcacgaccaagttcatctcttggaatgtgcttggatggagatattgatgatcggactcgtgtggaggtcaatggagcatcctggtaaacttcttttcgcacccaatctgctcttggatagagatcagggtaagtgcgtcgagggtggcgttgaaatcttcgacatgctccttgcgacatccagccgattccgaatgatgaatcttcaaggagaggaatttgtctgtcttaagagcattatactcctcaatagtggagtttacaccttcttgtcctctacactgaaatcacttgaggaaaaagatcacatacatagggtgttggataaaatcacggatacactcatacatctgatggcaaaagcaggattgaccctgcaacagcagcaccaacgactggcccaactgctgttgatccttagccatatcagacacatgtctaacaaaaggatggaacatttgtacagcatgaaatgtaagaacgtagtgccactgtccgatttgttgctggaaatgctggacgctcatcggctctaa

SEQ ID NO: 136 - protein, 787 aa, Artificial Sequence
  Description of Artificial Sequence: Synthetic Construct
MCHQQLVISWFSLVFLASPLVAIWELKKDVYVVELDWYPDAPGEMVVLTCDTPEEDGITWTLDQSSEVLGSGKTLTIQVKEFGDAGQYTCHKGGEVLSHSLLLLHKKEDGIWSTDILKDQKEPKNKTFLRCEAKNYSGRFTCWWLTTISTDLTFSVKSSRGSSDPQGVTCGAATLSAERVRGDNKEYEYSVECQEDSACPAAEESLPIEVMVDAVHKLKYENYTSSFFIRDIIKPDPPKNLQLKPLKNSRQVEVSWEYPDTWSTPHSYFSLTFCVQVQGKSKREKKDRVFTDKTSATVICRKNASISVRAQDRYYSSSWSEWASVPCSGGGGSGGGGSGGGGSRNLPVATPDPGMFPCLHHSQNLLRAVSNMLQKARQTLEFYPCTSEEIDHEDITKDKTSTVEACLPLELTKNESCLNSRETSFITNGSCLASRKTSFMMALCLSSIYEDLKMYQVEFKTMNAKLLMDPKRQIFLDQNMLAVIDELMQALNFNSETVPQKSSLEEPDFYKTKIKLCILLHAFRIRAVTIDRVMSYLNASGSSLALSLTADQMVSALLDAEPPILYSEYDPTRPFSEASMMGLLTNLADRELVHMINWAKRVPGFVDLTLHDQVHLLECAWMEILMIGLVWRSMEHPGKLLFAPNLLLDRDQGKCVEGGVEIFDMLLATSSRFRMMNLQGEEFVCLKSIILLNSGVYTFLSSTLKSLEEKDHIHRVLDKITDTLIHLMAKAGLTLQQQHQRLAQLLLILSHIRHMSNKRMEHLYSMKCKNVVPLSDLLLEMLDAHRL

SEQ ID NO: 137 - DNA, 2364 bp, Artificial Sequence
  Description of Artificial Sequence: Synthetic Construct
atgtgccaccaacagctcgtgatcagctggttctccctggtgttcctggctagccccctggtggccatctgggagctcaagaaagacgtgtacgtggtggaactggactggtaccccgacgcccctggcgaaatggtggtgctgacatgcgacacccctgaggaggatggcattacctggaccctcgatcagagctccgaggtgctgggcagcggcaaaaccctgaccatccaggtgaaggagtttggcgatgccggccagtacacatgtcacaagggcggcgaggtgctgagccactccctgctgctgctccacaagaaggaagatggcatctggagcaccgacattctgaaggatcagaaggagcccaagaacaagacattcctgaggtgtgaggccaagaactacagcggcaggtttacctgctggtggctgacaacaatcagcaccgacctcacattctccgtcaagtcctccaggggttcttccgaccctcaaggcgtgacatgcggcgctgccaccctgagcgctgagagagtcaggggcgacaacaaggagtacgagtacagcgtcgaatgtcaggaggacagcgcctgtcccgccgctgaagagagcctgcctatcgaggtgatggtggacgccgtgcacaaactgaagtatgagaattacacctccagcttcttcatcagggacatcatcaaacccgatccccccaagaacctgcagctgaagcctctgaagaacagcagacaggtcgaagtgtcctgggagtaccctgatacctggtccacaccccacagctacttcagcctgaccttttgcgtgcaggtgcagggcaagagcaaaagggagaagaaggacagggtgtttaccgacaagacctccgccacagtgatttgcagaaagaacgcctccatcagcgtgagggcccaggacaggtattacagcagctcctggagcgaatgggctagcgtgccctgtagcggaggaggaggcagcggaggaggaggttctggaggaggcggcagcagaaacctgcctgtcgctacccccgaccccggaatgttcccctgcctgcaccactcccagaacctcctgagggccgtgtccaacatgctgcagaaggctagacagaccctcgaattctacccctgtaccagcgaggagatcgaccatgaggacatcaccaaggataagaccagcaccgtggaggcttgcctgcctctggagctgaccaaaaacgagagctgcctgaacagcagggaaaccagcttcattaccaacggctcctgcctggcctccaggaagacatccttcatgatggccctgtgcctcagcagcatctacgaggacctgaagatgtatcaggtggagtttaagaccatgaatgccaagctgctgatggaccctaagaggcagatcttcctggaccagaatatgctggccgtgattgacgagctgatgcaggccctcaactttaacagcgagaccgtgccccagaaaagcagcctcgaagagcctgacttctacaaaaccaagattaagctgtgtatcctgctgcacgccttcaggatcagggccgtgaccatcgacagggtgatgagctacctgaacgccagcggatcctcactggcgctcagccttactgccgaccaaatggtatcagctcttctggacgcagaacccccaattctttattccgagtacgaccccacacgcccgttcagtgaagcttccatgatgggcctccttacgaaccttgccgaccgggaactcgtgcacatgatcaattgggcgaagcgggtgccggggttcgtagatttgacacttcacgaccaagttcatctcttggaatgtgcttggatggagatattgatgatcggactcgtgtggaggtcaatggagcatcctggtaaacttcttttcgcacccaatctgctcttggatagagatcagggtaagtgcgtcgagggtggcgttgaaatcttcgacatgctccttgcgacatccagccgattccgaatgatgaatcttcaaggagaggaatttgtctgtcttaagagcattatactcctcaatagtggagtttacaccttcttgtcctctacactgaaatcacttgaggaaaaagatcacatacatagggtgttggataaaatcacggatacactcatacatctgatggcaaaagcaggattgaccctgcaacagcagcaccaacgactggcccaactgctgttgatccttagccatatcagacacatgtctaacaaaaggatggaacatttgtacagcatgaaatgtaagaacgtagtgccactgtccgatttgttgctggaaatgctggacgctcatcggctctaa

SEQ ID NO: 138 - DNA, 4444 bp, Artificial Sequence
  Description of Artificial Sequence: Synthetic Construct
atggccttaccagtgaccgccttgctcctgccgctggccttgctgctccacgccgccaggccggacatccagatgacacagactacatcctccctgtctgcctctctgggagacagagtcaccatcagttgcagggcaagtcaggacattagtaaatatttaaattggtatcagcagaaaccagatggaactgttaaactcctgatctaccatacatcaagattacactcaggagtcccatcaaggttcagtggcagtgggtctggaacagattattctctcaccattagcaacctggagcaagaagatattgccacttacttttgccaacagggtaatacgcttccgtacacgttcggaggggggaccaagctggagatcacaggtggcggtggctcgggcggtggtgggtcgggtggcggcggatctgaggtgaaactgcaggagtcaggacctggcctggtggcgccctcacagagcctgtccgtcacatgcactgtctcaggggtctcattacccgactatggtgtaagctggattcgccagcctccacgaaagggtctggagtggctgggagtaatatggggtagtgaaaccacatactataattcagctctcaaatccagactgaccatcatcaaggacaactccaagagccaagttttcttaaaaatgaacagtctgcaaactgatgacacagccatttactactgtgccaaacattattactacggtggtagctatgctatggactactggggccaaggaacctcagtcaccgtctcctcaaccacgacgccagcgccgcgaccaccaacaccggcgcccaccatcgcgtcgcagcccctgtccctgcgcccagaggcgtgccggccagcggcggggggcgcagtgcacacgagggggctggacttcgcctgtgatatctacatctgggcgcccttggccgggacttgtggggtccttctcctgtcactggttatcaccctttactgcaaacggggcagaaagaaactcctgtatatattcaaacaaccatttatgagaccagtacaaactactcaagaggaagatggctgtagctgccgatttccagaagaagaagaaggaggatgtgaactgagagtgaagttcagcaggagcgcagacgcccccgcgtacaagcagggccagaaccagctctataacgagctcaatctaggacgaagagaggagtacgatgttttggacaagagacgtggccgggaccctgagatggggggaaagccgagaaggaagaaccctcaggaaggcctgtacaatgaactgcagaaagataagatggcggaggcctacagtgagattgggatgaaaggcgagcgccggaggggcaaggggcacgatggcctttaccagggtctcagtacagccaccaaggacacctacgacgcccttcacatgcaggccctgccccctcgctaaatcgggctagccgcccctctccctcccccccccctaacgttactggccgaagccgcttggaataaggccggtgtgcgtttgtctatatgttattttccaccatattgccgtcttttggcaatgtgagggcccggaaacctggccctgtcttcttgacgagcattcctaggggtctttcccctctcgccaaaggaatgcaaggtctgttgaatgtcgtgaaggaagcagttcctctggaagcttcttgaagacaaacaacgtctgtagcgaccctttgcaggcagcggaaccccccacctggcgacaggtgcctctgcggccaaaagccacgtgtataagatacacctgcaaaggcggcacaaccccagtgccacgttgtgagttggatagttgtggaaagagtcaaatggctctcctcaagcgtattcaacaaggggctgaaggatgcccagaaggtaccccattgtatgggatctgatctggggcctcggtgcacatgctttacatgtgtttagtcgaggttaaaaaaacgtctaggccccccgaaccacggggacgtggttttcctttgaaaaacacgatgataagcttgccacaacccacaaggagacgaccttccatgtgccaccaacagctcgtgatcagctggttctccctggtgttcctggctagccccctggtggccatctgggagctcaagaaagacgtgtacgtggtggaactggactggtaccccgacgcccctggcgaaatggtggtgctgacatgcgacacccctgaggaggatggcattacctggaccctcgatcagagctccgaggtgctgggcagcggcaaaaccctgaccatccaggtgaaggagtttggcgatgccggccagtacacatgtcacaagggcggcgaggtgctgagccactccctgctgctgctccacaagaaggaagatggcatctggagcaccgacattctgaaggatcagaaggagcccaagaacaagacattcctgaggtgtgaggccaagaactacagcggcaggtttacctgctggtggctgacaacaatcagcaccgacctcacattctccgtcaagtcctccaggggttcttccgaccctcaaggcgtgacatgcggcgctgccaccctgagcgctgagagagtcaggggcgacaacaaggagtacgagtacagcgtcgaatgtcaggaggacagcgcctgtcccgccgctgaagagagcctgcctatcgaggtgatggtggacgccgtgcacaaactgaagtatgagaattacacctccagcttcttcatcagggacatcatcaaacccgatccccccaagaacctgcagctgaagcctctgaagaacagcagacaggtcgaagtgtcctgggagtaccctgatacctggtccacaccccacagctacttcagcctgaccttttgcgtgcaggtgcagggcaagagcaaaagggagaagaaggacagggtgtttaccgacaagacctccgccacagtgatttgcagaaagaacgcctccatcagcgtgagggcccaggacaggtattacagcagctcctggagcgaatgggctagcgtgccctgtagcggaggaggaggcagcggaggaggaggttctggaggaggcggcagcagaaacctgcctgtcgctacccccgaccccggaatgttcccctgcctgcaccactcccagaacctcctgagggccgtgtccaacatgctgcagaaggctagacagaccctcgaattctacccctgtaccagcgaggagatcgaccatgaggacatcaccaaggataagaccagcaccgtggaggcttgcctgcctctggagctgaccaaaaacgagagctgcctgaacagcagggaaaccagcttcattaccaacggctcctgcctggcctccaggaagacatccttcatgatggccctgtgcctcagcagcatctacgaggacctgaagatgtatcaggtggagtttaagaccatgaatgccaagctgctgatggaccctaagaggcagatcttcctggaccagaatatgctggccgtgattgacgagctgatgcaggccctcaactttaacagcgagaccgtgccccagaaaagcagcctcgaagagcctgacttctacaaaaccaagattaagctgtgtatcctgctgcacgccttcaggatcagggccgtgaccatcgacagggtgatgagctacctgaacgccagcggatcctcactggcgctcagccttactgccgaccaaatggtatcagctcttctggacgcagaacccccaattctttattccgagtacgaccccacacgcccgttcagtgaagcttccatgatgggcctccttacgaaccttgccgaccgggaactcgtgcacatgatcaattgggcgaagcgggtgccggggttcgtagatttgacacttcacgaccaagttcatctcttggaatgtgcttggatggagatattgatgatcggactcgtgtggaggtcaatggagcatcctggtaaacttcttttcgcacccaatctgctcttggatagaaatcagggtaagtgcgtcgagggtggcgttgaaatcttcgacatgctccttgcgacatccagccgattccgaatgatgaatcttcaaggagaggaatttgtctgtcttaagagcattatactcctcaatagtggagtttacaccttcttgtcctctacactgaaatcacttgaggaaaaagatcacatacatagggtgttggataaaatcacggatacactcatacatctgatggcaaaagcaggattgaccctgcaacagcagcaccaacgactggcccaactgctgttgatccttagccatatcagacacatgtctagcaaaaggatggaacatttgtacagcatgaaatgtaagaacgtagtgccactgtccgatttgttgctggaaatgctggacgctcatcggctctaa

SEQ ID NO: 139 - protein, 787 aa, Artificial Sequence
  Description of Artificial Sequence: Synthetic Construct
MCHQQLVISWFSLVFLASPLVAIWELKKDVYVVELDWYPDAPGEMVVLTCDTPEEDGITWTLDQSSEVLGSGKTLTIQVKEFGDAGQYTCHKGGEVLSHSLLLLHKKEDGIWSTDILKDQKEPKNKTFLRCEAKNYSGRFTCWWLTTISTDLTFSVKSSRGSSDPQGVTCGAATLSAERVRGDNKEYEYSVECQEDSACPAAEESLPIEVMVDAVHKLKYENYTSSFFIRDIIKPDPPKNLQLKPLKNSRQVEVSWEYPDTWSTPHSYFSLTFCVQVQGKSKREKKDRVFTDKTSATVICRKNASISVRAQDRYYSSSWSEWASVPCSGGGGSGGGGSGGGGSRNLPVATPDPGMFPCLHHSQNLLRAVSNMLQKARQTLEFYPCTSEEIDHEDITKDKTSTVEACLPLELTKNESCLNSRETSFITNGSCLASRKTSFMMALCLSSIYEDLKMYQVEFKTMNAKLLMDPKRQIFLDQNMLAVIDELMQALNFNSETVPQKSSLEEPDFYKTKIKLCILLHAFRIRAVTIDRVMSYLNASGSSLALSLTADQMVSALLDAEPPILYSEYDPTRPFSEASMMGLLTNLADRELVHMINWAKRVPGFVDLTLHDQVHLLECAWMEILMIGLVWRSMEHPGKLLFAPNLLLDRNQGKCVEGGVEIFDMLLATSSRFRMMNLQGEEFVCLKSIILLNSGVYTFLSSTLKSLEEKDHIHRVLDKITDTLIHLMAKAGLTLQQQHQRLAQLLLILSHIRHMSSKRMEHLYSMKCKNVVPLSDLLLEMLDAHRL

SEQ ID NO: 140 - DNA, 2364 bp, Artificial Sequence
  Description of Artificial Sequence: Synthetic Construct
atgtgccaccaacagctcgtgatcagctggttctccctggtgttcctggctagccccctggtggccatctgggagctcaagaaagacgtgtacgtggtggaactggactggtaccccgacgcccctggcgaaatggtggtgctgacatgcgacacccctgaggaggatggcattacctggaccctcgatcagagctccgaggtgctgggcagcggcaaaaccctgaccatccaggtgaaggagtttggcgatgccggccagtacacatgtcacaagggcggcgaggtgctgagccactccctgctgctgctccacaagaaggaagatggcatctggagcaccgacattctgaaggatcagaaggagcccaagaacaagacattcctgaggtgtgaggccaagaactacagcggcaggtttacctgctggtggctgacaacaatcagcaccgacctcacattctccgtcaagtcctccaggggttcttccgaccctcaaggcgtgacatgcggcgctgccaccctgagcgctgagagagtcaggggcgacaacaaggagtacgagtacagcgtcgaatgtcaggaggacagcgcctgtcccgccgctgaagagagcctgcctatcgaggtgatggtggacgccgtgcacaaactgaagtatgagaattacacctccagcttcttcatcagggacatcatcaaacccgatccccccaagaacctgcagctgaagcctctgaagaacagcagacaggtcgaagtgtcctgggagtaccctgatacctggtccacaccccacagctacttcagcctgaccttttgcgtgcaggtgcagggcaagagcaaaagggagaagaaggacagggtgtttaccgacaagacctccgccacagtgatttgcagaaagaacgcctccatcagcgtgagggcccaggacaggtattacagcagctcctggagcgaatgggctagcgtgccctgtagcggaggaggaggcagcggaggaggaggttctggaggaggcggcagcagaaacctgcctgtcgctacccccgaccccggaatgttcccctgcctgcaccactcccagaacctcctgagggccgtgtccaacatgctgcagaaggctagacagaccctcgaattctacccctgtaccagcgaggagatcgaccatgaggacatcaccaaggataagaccagcaccgtggaggcttgcctgcctctggagctgaccaaaaacgagagctgcctgaacagcagggaaaccagcttcattaccaacggctcctgcctggcctccaggaagacatccttcatgatggccctgtgcctcagcagcatctacgaggacctgaagatgtatcaggtggagtttaagaccatgaatgccaagctgctgatggaccctaagaggcagatcttcctggaccagaatatgctggccgtgattgacgagctgatgcaggccctcaactttaacagcgagaccgtgccccagaaaagcagcctcgaagagcctgacttctacaaaaccaagattaagctgtgtatcctgctgcacgccttcaggatcagggccgtgaccatcgacagggtgatgagctacctgaacgccagcggatcctcactggcgctcagccttactgccgaccaaatggtatcagctcttctggacgcagaacccccaattctttattccgagtacgaccccacacgcccgttcagtgaagcttccatgatgggcctccttacgaaccttgccgaccgggaactcgtgcacatgatcaattgggcgaagcgggtgccggggttcgtagatttgacacttcacgaccaagttcatctcttggaatgtgcttggatggagatattgatgatcggactcgtgtggaggtcaatggagcatcctggtaaacttcttttcgcacccaatctgctcttggatagaaatcagggtaagtgcgtcgagggtggcgttgaaatcttcgacatgctccttgcgacatccagccgattccgaatgatgaatcttcaaggagaggaatttgtctgtcttaagagcattatactcctcaatagtggagtttacaccttcttgtcctctacactgaaatcacttgaggaaaaagatcacatacatagggtgttggataaaatcacggatacactcatacatctgatggcaaaagcaggattgaccctgcaacagcagcaccaacgactggcccaactgctgttgatccttagccatatcagacacatgtctagcaaaaggatggaacatttgtacagcatgaaatgtaagaacgtagtgccactgtccgatttgttgctggaaatgctggacgctcatcggctctaa

SEQ ID NO: 141 - DNA, 4444 bp, Artificial Sequence
  Description of Artificial Sequence: Synthetic Construct
atggccttaccagtgaccgccttgctcctgccgctggccttgctgctccacgccgccaggccggacatccagatgacacagactacatcctccctgtctgcctctctgggagacagagtcaccatcagttgcagggcaagtcaggacattagtaaatatttaaattggtatcagcagaaaccagatggaactgttaaactcctgatctaccatacatcaagattacactcaggagtcccatcaaggttcagtggcagtgggtctggaacagattattctctcaccattagcaacctggagcaagaagatattgccacttacttttgccaacagggtaatacgcttccgtacacgttcggaggggggaccaagctggagatcacaggtggcggtggctcgggcggtggtgggtcgggtggcggcggatctgaggtgaaactgcaggagtcaggacctggcctggtggcgccctcacagagcctgtccgtcacatgcactgtctcaggggtctcattacccgactatggtgtaagctggattcgccagcctccacgaaagggtctggagtggctgggagtaatatggggtagtgaaaccacatactataattcagctctcaaatccagactgaccatcatcaaggacaactccaagagccaagttttcttaaaaatgaacagtctgcaaactgatgacacagccatttactactgtgccaaacattattactacggtggtagctatgctatggactactggggccaaggaacctcagtcaccgtctcctcaaccacgacgccagcgccgcgaccaccaacaccggcgcccaccatcgcgtcgcagcccctgtccctgcgcccagaggcgtgccggccagcggcggggggcgcagtgcacacgagggggctggacttcgcctgtgatatctacatctgggcgcccttggccgggacttgtggggtccttctcctgtcactggttatcaccctttactgcaaacggggcagaaagaaactcctgtatatattcaaacaaccatttatgagaccagtacaaactactcaagaggaagatggctgtagctgccgatttccagaagaagaagaaggaggatgtgaactgagagtgaagttcagcaggagcgcagacgcccccgcgtacaagcagggccagaaccagctctataacgagctcaatctaggacgaagagaggagtacgatgttttggacaagagacgtggccgggaccctgagatggggggaaagccgagaaggaagaaccctcaggaaggcctgtacaatgaactgcagaaagataagatggcggaggcctacagtgagattgggatgaaaggcgagcgccggaggggcaaggggcacgatggcctttaccagggtctcagtacagccaccaaggacacctacgacgcccttcacatgcaggccctgccccctcgctaaatcgggctagccgcccctctccctcccccccccctaacgttactggccgaagccgcttggaataaggccggtgtgcgtttgtctatatgttattttccaccatattgccgtcttttggcaatgtgagggcccggaaacctggccctgtcttcttgacgagcattcctaggggtctttcccctctcgccaaaggaatgcaaggtctgttgaatgtcgtgaaggaagcagttcctctggaagcttcttgaagacaaacaacgtctgtagcgaccctttgcaggcagcggaaccccccacctggcgacaggtgcctctgcggccaaaagccacgtgtataagatacacctgcaaaggcggcacaaccccagtgccacgttgtgagttggatagttgtggaaagagtcaaatggctctcctcaagcgtattcaacaaggggctgaaggatgcccagaaggtaccccattgtatgggatctgatctggggcctcggtgcacatgctttacatgtgtttagtcgaggttaaaaaaacgtctaggccccccgaaccacggggacgtggttttcctttgaaaaacacgatgataagcttgccacaacccacaaggagacgaccttccatgtgccaccaacagctcgtgatcagctggttctccctggtgttcctggctagccccctggtggccatctgggagctcaagaaagacgtgtacgtggtggaactggactggtaccccgacgcccctggcgaaatggtggtgctgacatgcgacacccctgaggaggatggcattacctggaccctcgatcagagctccgaggtgctgggcagcggcaaaaccctgaccatccaggtgaaggagtttggcgatgccggccagtacacatgtcacaagggcggcgaggtgctgagccactccctgctgctgctccacaagaaggaagatggcatctggagcaccgacattctgaaggatcagaaggagcccaagaacaagacattcctgaggtgtgaggccaagaactacagcggcaggtttacctgctggtggctgacaacaatcagcaccgacctcacattctccgtcaagtcctccaggggttcttccgaccctcaaggcgtgacatgcggcgctgccaccctgagcgctgagagagtcaggggcgacaacaaggagtacgagtacagcgtcgaatgtcaggaggacagcgcctgtcccgccgctgaagagagcctgcctatcgaggtgatggtggacgccgtgcacaaactgaagtatgagaattacacctccagcttcttcatcagggacatcatcaaacccgatccccccaagaacctgcagctgaagcctctgaagaacagcagacaggtcgaagtgtcctgggagtaccctgatacctggtccacaccccacagctacttcagcctgaccttttgcgtgcaggtgcagggcaagagcaaaagggagaagaaggacagggtgtttaccgacaagacctccgccacagtgatttgcagaaagaacgcctccatcagcgtgagggcccaggacaggtattacagcagctcctggagcgaatgggctagcgtgccctgtagcggaggaggaggcagcggaggaggaggttctggaggaggcggcagcagaaacctgcctgtcgctacccccgaccccggaatgttcccctgcctgcaccactcccagaacctcctgagggccgtgtccaacatgctgcagaaggctagacagaccctcgaattctacccctgtaccagcgaggagatcgaccatgaggacatcaccaaggataagaccagcaccgtggaggcttgcctgcctctggagctgaccaaaaacgagagctgcctgaacagcagggaaaccagcttcattaccaacggctcctgcctggcctccaggaagacatccttcatgatggccctgtgcctcagcagcatctacgaggacctgaagatgtatcaggtggagtttaagaccatgaatgccaagctgctgatggaccctaagaggcagatcttcctggaccagaatatgctggccgtgattgacgagctgatgcaggccctcaactttaacagcgagaccgtgccccagaaaagcagcctcgaagagcctgacttctacaaaaccaagattaagctgtgtatcctgctgcacgccttcaggatcagggccgtgaccatcgacagggtgatgagctacctgaacgccagcggatcctcactggcgctcagccttactgccgaccaaatggtatcagctcttctggacgcagaacccccaattctttattccgagtacgaccccacacgcccgttcagtgaagcttccatgatgggcctccttacgaaccttgccgaccgggaactcgtgcacatgatcaattgggcgaagcgggtgccggggttcgtagatttgacacttcacgaccaagttcatctcttggaatgtgcttggatggagatattgatgatcggactcgtgtggaggtcaatggagcatcctggtaaacttcttttcgcacccaatctgctcttggatagaaatcagggtaagtgcgtcgagggtggcgttgaaatcttcgacatgctccttgcgacatccagccgattccgaatgatgaatcttcaaggagaggaatttgtctgtcttaagagcattatactcctcaatagtggagtttacaccttcttgtcctctacactgaaatcacttgaggaaaaagatcacatacatagggtgttggataaaatcacggatacactcatacatctgatggcaaaagcaggattgaccctgcaacagcagcaccgacgactggcccaactgctgttgatccttagccatatcagacacatgtctaacaaaaggatggaacatttgtacagcatgaaatgtaagaacgtagtgccactgtccgatttgttgctggaaatgctggacgctcatcggctctaa

SEQ ID NO: 142 - protein, 787 aa, Artificial Sequence
  Description of Artificial Sequence: Synthetic Construct
MCHQQLVISWFSLVFLASPLVAIWELKKDVYVVELDWYPDAPGEMVVLTCDTPEEDGITWTLDQSSEVLGSGKTLTIQVKEFGDAGQYTCHKGGEVLSHSLLLLHKKEDGIWSTDILKDQKEPKNKTFLRCEAKNYSGRFTCWWLTTISTDLTFSVKSSRGSSDPQGVTCGAATLSAERVRGDNKEYEYSVECQEDSACPAAEESLPIEVMVDAVHKLKYENYTSSFFIRDIIKPDPPKNLQLKPLKNSRQVEVSWEYPDTWSTPHSYFSLTFCVQVQGKSKREKKDRVFTDKTSATVICRKNASISVRAQDRYYSSSWSEWASVPCSGGGGSGGGGSGGGGSRNLPVATPDPGMFPCLHHSQNLLRAVSNMLQKARQTLEFYPCTSEEIDHEDITKDKTSTVEACLPLELTKNESCLNSRETSFITNGSCLASRKTSFMMALCLSSIYEDLKMYQVEFKTMNAKLLMDPKRQIFLDQNMLAVIDELMQALNFNSETVPQKSSLEEPDFYKTKIKLCILLHAFRIRAVTIDRVMSYLNASGSSLALSLTADQMVSALLDAEPPILYSEYDPTRPFSEASMMGLLTNLADRELVHMINWAKRVPGFVDLTLHDQVHLLECAWMEILMIGLVWRSMEHPGKLLFAPNLLLDRNQGKCVEGGVEIFDMLLATSSRFRMMNLQGEEFVCLKSIILLNSGVYTFLSSTLKSLEEKDHIHRVLDKITDTLIHLMAKAGLTLQQQHRRLAQLLLILSHIRHMSNKRMEHLYSMKCKNVVPLSDLLLEMLDAHRL

SEQ ID NO: 143 - DNA, 2364 bp, Artificial Sequence
  Description of Artificial Sequence: Synthetic Construct
atgtgccaccaacagctcgtgatcagctggttctccctggtgttcctggctagccccctggtggccatctgggagctcaagaaagacgtgtacgtggtggaactggactggtaccccgacgcccctggcgaaatggtggtgctgacatgcgacacccctgaggaggatggcattacctggaccctcgatcagagctccgaggtgctgggcagcggcaaaaccctgaccatccaggtgaaggagtttggcgatgccggccagtacacatgtcacaagggcggcgaggtgctgagccactccctgctgctgctccacaagaaggaagatggcatctggagcaccgacattctgaaggatcagaaggagcccaagaacaagacattcctgaggtgtgaggccaagaactacagcggcaggtttacctgctggtggctgacaacaatcagcaccgacctcacattctccgtcaagtcctccaggggttcttccgaccctcaaggcgtgacatgcggcgctgccaccctgagcgctgagagagtcaggggcgacaacaaggagtacgagtacagcgtcgaatgtcaggaggacagcgcctgtcccgccgctgaagagagcctgcctatcgaggtgatggtggacgccgtgcacaaactgaagtatgagaattacacctccagcttcttcatcagggacatcatcaaacccgatccccccaagaacctgcagctgaagcctctgaagaacagcagacaggtcgaagtgtcctgggagtaccctgatacctggtccacaccccacagctacttcagcctgaccttttgcgtgcaggtgcagggcaagagcaaaagggagaagaaggacagggtgtttaccgacaagacctccgccacagtgatttgcagaaagaacgcctccatcagcgtgagggcccaggacaggtattacagcagctcctggagcgaatgggctagcgtgccctgtagcggaggaggaggcagcggaggaggaggttctggaggaggcggcagcagaaacctgcctgtcgctacccccgaccccggaatgttcccctgcctgcaccactcccagaacctcctgagggccgtgtccaacatgctgcagaaggctagacagaccctcgaattctacccctgtaccagcgaggagatcgaccatgaggacatcaccaaggataagaccagcaccgtggaggcttgcctgcctctggagctgaccaaaaacgagagctgcctgaacagcagggaaaccagcttcattaccaacggctcctgcctggcctccaggaagacatccttcatgatggccctgtgcctcagcagcatctacgaggacctgaagatgtatcaggtggagtttaagaccatgaatgccaagctgctgatggaccctaagaggcagatcttcctggaccagaatatgctggccgtgattgacgagctgatgcaggccctcaactttaacagcgagaccgtgccccagaaaagcagcctcgaagagcctgacttctacaaaaccaagattaagctgtgtatcctgctgcacgccttcaggatcagggccgtgaccatcgacagggtgatgagctacctgaacgccagcggatcctcactggcgctcagccttactgccgaccaaatggtatcagctcttctggacgcagaacccccaattctttattccgagtacgaccccacacgcccgttcagtgaagcttccatgatgggcctccttacgaaccttgccgaccgggaactcgtgcacatgatcaattgggcgaagcgggtgccggggttcgtagatttgacacttcacgaccaagttcatctcttggaatgtgcttggatggagatattgatgatcggactcgtgtggaggtcaatggagcatcctggtaaacttcttttcgcacccaatctgctcttggatagaaatcagggtaagtgcgtcgagggtggcgttgaaatcttcgacatgctccttgcgacatccagccgattccgaatgatgaatcttcaaggagaggaatttgtctgtcttaagagcattatactcctcaatagtggagtttacaccttcttgtcctctacactgaaatcacttgaggaaaaagatcacatacatagggtgttggataaaatcacggatacactcatacatctgatggcaaaagcaggattgaccctgcaacagcagcaccgacgactggcccaactgctgttgatccttagccatatcagacacatgtctaacaaaaggatggaacatttgtacagcatgaaatgtaagaacgtagtgccactgtccgatttgttgctggaaatgctggacgctcatcggctctaa

SEQ ID NO: 144 - DNA, 4444 bp, Artificial Sequence
  Description of Artificial Sequence: Synthetic Construct
atggccttaccagtgaccgccttgctcctgccgctggccttgctgctccacgccgccaggccggacatccagatgacacagactacatcctccctgtctgcctctctgggagacagagtcaccatcagttgcagggcaagtcaggacattagtaaatatttaaattggtatcagcagaaaccagatggaactgttaaactcctgatctaccatacatcaagattacactcaggagtcccatcaaggttcagtggcagtgggtctggaacagattattctctcaccattagcaacctggagcaagaagatattgccacttacttttgccaacagggtaatacgcttccgtacacgttcggaggggggaccaagctggagatcacaggtggcggtggctcgggcggtggtgggtcgggtggcggcggatctgaggtgaaactgcaggagtcaggacctggcctggtggcgccctcacagagcctgtccgtcacatgcactgtctcaggggtctcattacccgactatggtgtaagctggattcgccagcctccacgaaagggtctggagtggctgggagtaatatggggtagtgaaaccacatactataattcagctctcaaatccagactgaccatcatcaaggacaactccaagagccaagttttcttaaaaatgaacagtctgcaaactgatgacacagccatttactactgtgccaaacattattactacggtggtagctatgctatggactactggggccaaggaacctcagtcaccgtctcctcaaccacgacgccagcgccgcgaccaccaacaccggcgcccaccatcgcgtcgcagcccctgtccctgcgcccagaggcgtgccggccagcggcggggggcgcagtgcacacgagggggctggacttcgcctgtgatatctacatctgggcgcccttggccgggacttgtggggtccttctcctgtcactggttatcaccctttactgcaaacggggcagaaagaaactcctgtatatattcaaacaaccatttatgagaccagtacaaactactcaagaggaagatggctgtagctgccgatttccagaagaagaagaaggaggatgtgaactgagagtgaagttcagcaggagcgcagacgcccccgcgtacaagcagggccagaaccagctctataacgagctcaatctaggacgaagagaggagtacgatgttttggacaagagacgtggccgggaccctgagatggggggaaagccgagaaggaagaaccctcaggaaggcctgtacaatgaactgcagaaagataagatggcggaggcctacagtgagattgggatgaaaggcgagcgccggaggggcaaggggcacgatggcctttaccagggtctcagtacagccaccaaggacacctacgacgcccttcacatgcaggccctgccccctcgctaaatcgggctagccgcccctctccctcccccccccctaacgttactggccgaagccgcttggaataaggccggtgtgcgtttgtctatatgttattttccaccatattgccgtcttttggcaatgtgagggcccggaaacctggccctgtcttcttgacgagcattcctaggggtctttcccctctcgccaaaggaatgcaaggtctgttgaatgtcgtgaaggaagcagttcctctggaagcttcttgaagacaaacaacgtctgtagcgaccctttgcaggcagcggaaccccccacctggcgacaggtgcctctgcggccaaaagccacgtgtataagatacacctgcaaaggcggcacaaccccagtgccacgttgtgagttggatagttgtggaaagagtcaaatggctctcctcaagcgtattcaacaaggggctgaaggatgcccagaaggtaccccattgtatgggatctgatctggggcctcggtgcacatgctttacatgtgtttagtcgaggttaaaaaaacgtctaggccccccgaaccacggggacgtggttttcctttgaaaaacacgatgataagcttgccacaacccacaaggagacgaccttccatgtgccaccaacagctcgtgatcagctggttctccctggtgttcctggctagccccctggtggccatctgggagctcaagaaagacgtgtacgtggtggaactggactggtaccccgacgcccctggcgaaatggtggtgctgacatgcgacacccctgaggaggatggcattacctggaccctcgatcagagctccgaggtgctgggcagcggcaaaaccctgaccatccaggtgaaggagtttggcgatgccggccagtacacatgtcacaagggcggcgaggtgctgagccactccctgctgctgctccacaagaaggaagatggcatctggagcaccgacattctgaaggatcagaaggagcccaagaacaagacattcctgaggtgtgaggccaagaactacagcggcaggtttacctgctggtggctgacaacaatcagcaccgacctcacattctccgtcaagtcctccaggggttcttccgaccctcaaggcgtgacatgcggcgctgccaccctgagcgctgagagagtcaggggcgacaacaaggagtacgagtacagcgtcgaatgtcaggaggacagcgcctgtcccgccgctgaagagagcctgcctatcgaggtgatggtggacgccgtgcacaaactgaagtatgagaattacacctccagcttcttcatcagggacatcatcaaacccgatccccccaagaacctgcagctgaagcctctgaagaacagcagacaggtcgaagtgtcctgggagtaccctgatacctggtccacaccccacagctacttcagcctgaccttttgcgtgcaggtgcagggcaagagcaaaagggagaagaaggacagggtgtttaccgacaagacctccgccacagtgatttgcagaaagaacgcctccatcagcgtgagggcccaggacaggtattacagcagctcctggagcgaatgggctagcgtgccctgtagcggaggaggaggcagcggaggaggaggttctggaggaggcggcagcagaaacctgcctgtcgctacccccgaccccggaatgttcccctgcctgcaccactcccagaacctcctgagggccgtgtccaacatgctgcagaaggctagacagaccctcgaattctacccctgtaccagcgaggagatcgaccatgaggacatcaccaaggataagaccagcaccgtggaggcttgcctgcctctggagctgaccaaaaacgagagctgcctgaacagcagggaaaccagcttcattaccaacggctcctgcctggcctccaggaagacatccttcatgatggccctgtgcctcagcagcatctacgaggacctgaagatgtatcaggtggagtttaagaccatgaatgccaagctgctgatggaccctaagaggcagatcttcctggaccagaatatgctggccgtgattgacgagctgatgcaggccctcaactttaacagcgagaccgtgccccagaaaagcagcctcgaagagcctgacttctacaaaaccaagattaagctgtgtatcctgctgcacgccttcaggatcagggccgtgaccatcgacagggtgatgagctacctgaacgccagcggatcctcactggcgctcagccttactgccgaccaaatggtatcagctcttctggacgcagaacccccaattctttattccgagtacgaccccacacgcccgttcagtgaagcttccatgatgggcctccttacgaaccttgccgaccgggaactcgtgcacatgatcaattgggcgaagcgggtgccggggttcgtagatttggcacttcacgaccaagttcatctcttggaatgtgcttggatggagatattgatgatcggactcgtgtggaggtcaatggagcatcctggtaaacttcttttcgcacccaatctgctcttggatagaaatcagggtaagtgcgtcgagggtggcgttgaaatcttcgacatgctccttgcgacatccagccgattccgaatgatgaatcttcaaggagaggaatttgtctgtcttaagagcattatactcctcaatagtggagtttacaccttcttgtcctctacactgaaatcacttgaggaaaaagatcacatacatagggtgttggataaaatcacggatacactcatacatctgatggcaaaagcaggattgaccctgcaacagcagcaccaacgactggcccaactgctgttgatccttagccatatcagacacatgtctagcaaaaggatggaacatttgtacagcatgaaatgtaagaacgtagtgccactgtccgatttgttgctggaaatgctggacgctcatcggctctaa

SEQ ID NO: 145 - protein, 787 aa, Artificial Sequence
  Description of Artificial Sequence: Synthetic Construct
MCHQQLVISWFSLVFLASPLVAIWELKKDVYVVELDWYPDAPGEMVVLTCDTPEEDGITWTLDQSSEVLGSGKTLTIQVKEFGDAGQYTCHKGGEVLSHSLLLLHKKEDGIWSTDILKDQKEPKNKTFLRCEAKNYSGRFTCWWLTTISTDLTFSVKSSRGSSDPQGVTCGAATLSAERVRGDNKEYEYSVECQEDSACPAAEESLPIEVMVDAVHKLKYENYTSSFFIRDIIKPDPPKNLQLKPLKNSRQVEVSWEYPDTWSTPHSYFSLTFCVQVQGKSKREKKDRVFTDKTSATVICRKNASISVRAQDRYYSSSWSEWASVPCSGGGGSGGGGSGGGGSRNLPVATPDPGMFPCLHHSQNLLRAVSNMLQKARQTLEFYPCTSEEIDHEDITKDKTSTVEACLPLELTKNESCLNSRETSFITNGSCLASRKTSFMMALCLSSIYEDLKMYQVEFKTMNAKLLMDPKRQIFLDQNMLAVIDELMQALNFNSETVPQKSSLEEPDFYKTKIKLCILLHAFRIRAVTIDRVMSYLNASGSSLALSLTADQMVSALLDAEPPILYSEYDPTRPFSEASMMGLLTNLADRELVHMINWAKRVPGFVDLALHDQVHLLECAWMEILMIGLVWRSMEHPGKLLFAPNLLLDRNQGKCVEGGVEIFDMLLATSSRFRMMNLQGEEFVCLKSIILLNSGVYTFLSSTLKSLEEKDHIHRVLDKITDTLIHLMAKAGLTLQQQHQRLAQLLLILSHIRHMSSKRMEHLYSMKCKNVVPLSDLLLEMLDAHRL

SEQ ID NO: 146 - DNA, 2364 bp, Artificial Sequence
  Description of Artificial Sequence: Synthetic Construct
atgtgccaccaacagctcgtgatcagctggttctccctggtgttcctggctagccccctggtggccatctgggagctcaagaaagacgtgtacgtggtggaactggactggtaccccgacgcccctggcgaaatggtggtgctgacatgcgacacccctgaggaggatggcattacctggaccctcgatcagagctccgaggtgctgggcagcggcaaaaccctgaccatccaggtgaaggagtttggcgatgccggccagtacacatgtcacaagggcggcgaggtgctgagccactccctgctgctgctccacaagaaggaagatggcatctggagcaccgacattctgaaggatcagaaggagcccaagaacaagacattcctgaggtgtgaggccaagaactacagcggcaggtttacctgctggtggctgacaacaatcagcaccgacctcacattctccgtcaagtcctccaggggttcttccgaccctcaaggcgtgacatgcggcgctgccaccctgagcgctgagagagtcaggggcgacaacaaggagtacgagtacagcgtcgaatgtcaggaggacagcgcctgtcccgccgctgaagagagcctgcctatcgaggtgatggtggacgccgtgcacaaactgaagtatgagaattacacctccagcttcttcatcagggacatcatcaaacccgatccccccaagaacctgcagctgaagcctctgaagaacagcagacaggtcgaagtgtcctgggagtaccctgatacctggtccacaccccacagctacttcagcctgaccttttgcgtgcaggtgcagggcaagagcaaaagggagaagaaggacagggtgtttaccgacaagacctccgccacagtgatttgcagaaagaacgcctccatcagcgtgagggcccaggacaggtattacagcagctcctggagcgaatgggctagcgtgccctgtagcggaggaggaggcagcggaggaggaggttctggaggaggcggcagcagaaacctgcctgtcgctacccccgaccccggaatgttcccctgcctgcaccactcccagaacctcctgagggccgtgtccaacatgctgcagaaggctagacagaccctcgaattctacccctgtaccagcgaggagatcgaccatgaggacatcaccaaggataagaccagcaccgtggaggcttgcctgcctctggagctgaccaaaaacgagagctgcctgaacagcagggaaaccagcttcattaccaacggctcctgcctggcctccaggaagacatccttcatgatggccctgtgcctcagcagcatctacgaggacctgaagatgtatcaggtggagtttaagaccatgaatgccaagctgctgatggaccctaagaggcagatcttcctggaccagaatatgctggccgtgattgacgagctgatgcaggccctcaactttaacagcgagaccgtgccccagaaaagcagcctcgaagagcctgacttctacaaaaccaagattaagctgtgtatcctgctgcacgccttcaggatcagggccgtgaccatcgacagggtgatgagctacctgaacgccagcggatcctcactggcgctcagccttactgccgaccaaatggtatcagctcttctggacgcagaacccccaattctttattccgagtacgaccccacacgcccgttcagtgaagcttccatgatgggcctccttacgaaccttgccgaccgggaactcgtgcacatgatcaattgggcgaagcgggtgccggggttcgtagatttggcacttcacgaccaagttcatctcttggaatgtgcttggatggagatattgatgatcggactcgtgtggaggtcaatggagcatcctggtaaacttcttttcgcacccaatctgctcttggatagaaatcagggtaagtgcgtcgagggtggcgttgaaatcttcgacatgctccttgcgacatccagccgattccgaatgatgaatcttcaaggagaggaatttgtctgtcttaagagcattatactcctcaatagtggagtttacaccttcttgtcctctacactgaaatcacttgaggaaaaagatcacatacatagggtgttggataaaatcacggatacactcatacatctgatggcaaaagcaggattgaccctgcaacagcagcaccaacgactggcccaactgctgttgatccttagccatatcagacacatgtctagcaaaaggatggaacatttgtacagcatgaaatgtaagaacgtagtgccactgtccgatttgttgctggaaatgctggacgctcatcggctctaa

SEQ ID NO: 147 - DNA, 4444 bp, Artificial Sequence
  Description of Artificial Sequence: Synthetic Construct
atggccttaccagtgaccgccttgctcctgccgctggccttgctgctccacgccgccaggccggacatccagatgacacagactacatcctccctgtctgcctctctgggagacagagtcaccatcagttgcagggcaagtcaggacattagtaaatatttaaattggtatcagcagaaaccagatggaactgttaaactcctgatctaccatacatcaagattacactcaggagtcccatcaaggttcagtggcagtgggtctggaacagattattctctcaccattagcaacctggagcaagaagatattgccacttacttttgccaacagggtaatacgcttccgtacacgttcggaggggggaccaagctggagatcacaggtggcggtggctcgggcggtggtgggtcgggtggcggcggatctgaggtgaaactgcaggagtcaggacctggcctggtggcgccctcacagagcctgtccgtcacatgcactgtctcaggggtctcattacccgactatggtgtaagctggattcgccagcctccacgaaagggtctggagtggctgggagtaatatggggtagtgaaaccacatactataattcagctctcaaatccagactgaccatcatcaaggacaactccaagagccaagttttcttaaaaatgaacagtctgcaaactgatgacacagccatttactactgtgccaaacattattactacggtggtagctatgctatggactactggggccaaggaacctcagtcaccgtctcctcaaccacgacgccagcgccgcgaccaccaacaccggcgcccaccatcgcgtcgcagcccctgtccctgcgcccagaggcgtgccggccagcggcggggggcgcagtgcacacgagggggctggacttcgcctgtgatatctacatctgggcgcccttggccgggacttgtggggtccttctcctgtcactggttatcaccctttactgcaaacggggcagaaagaaactcctgtatatattcaaacaaccatttatgagaccagtacaaactactcaagaggaagatggctgtagctgccgatttccagaagaagaagaaggaggatgtgaactgagagtgaagttcagcaggagcgcagacgcccccgcgtacaagcagggccagaaccagctctataacgagctcaatctaggacgaagagaggagtacgatgttttggacaagagacgtggccgggaccctgagatggggggaaagccgagaaggaagaaccctcaggaaggcctgtacaatgaactgcagaaagataagatggcggaggcctacagtgagattgggatgaaaggcgagcgccggaggggcaaggggcacgatggcctttaccagggtctcagtacagccaccaaggacacctacgacgcccttcacatgcaggccctgccccctcgctaaatcgggctagccgcccctctccctcccccccccctaacgttactggccgaagccgcttggaataaggccggtgtgcgtttgtctatatgttattttccaccatattgccgtcttttggcaatgtgagggcccggaaacctggccctgtcttcttgacgagcattcctaggggtctttcccctctcgccaaaggaatgcaaggtctgttgaatgtcgtgaaggaagcagttcctctggaagcttcttgaagacaaacaacgtctgtagcgaccctttgcaggcagcggaaccccccacctggcgacaggtgcctctgcggccaaaagccacgtgtataagatacacctgcaaaggcggcacaaccccagtgccacgttgtgagttggatagttgtggaaagagtcaaatggctctcctcaagcgtattcaacaaggggctgaaggatgcccagaaggtaccccattgtatgggatctgatctggggcctcggtgcacatgctttacatgtgtttagtcgaggttaaaaaaacgtctaggccccccgaaccacggggacgtggttttcctttgaaaaacacgatgataagcttgccacaacccacaaggagacgaccttccatgtgccaccaacagctcgtgatcagctggttctccctggtgttcctggctagccccctggtggccatctgggagctcaagaaagacgtgtacgtggtggaactggactggtaccccgacgcccctggcgaaatggtggtgctgacatgcgacacccctgaggaggatggcattacctggaccctcgatcagagctccgaggtgctgggcagcggcaaaaccctgaccatccaggtgaaggagtttggcgatgccggccagtacacatgtcacaagggcggcgaggtgctgagccactccctgctgctgctccacaagaaggaagatggcatctggagcaccgacattctgaaggatcagaaggagcccaagaacaagacattcctgaggtgtgaggccaagaactacagcggcaggtttacctgctggtggctgacaacaatcagcaccgacctcacattctccgtcaagtcctccaggggttcttccgaccctcaaggcgtgacatgcggcgctgccaccctgagcgctgagagagtcaggggcgacaacaaggagtacgagtacagcgtcgaatgtcaggaggacagcgcctgtcccgccgctgaagagagcctgcctatcgaggtgatggtggacgccgtgcacaaactgaagtatgagaattacacctccagcttcttcatcagggacatcatcaaacccgatccccccaagaacctgcagctgaagcctctgaagaacagcagacaggtcgaagtgtcctgggagtaccctgatacctggtccacaccccacagctacttcagcctgaccttttgcgtgcaggtgcagggcaagagcaaaagggagaagaaggacagggtgtttaccgacaagacctccgccacagtgatttgcagaaagaacgcctccatcagcgtgagggcccaggacaggtattacagcagctcctggagcgaatgggctagcgtgccctgtagcggaggaggaggcagcggaggaggaggttctggaggaggcggcagcagaaacctgcctgtcgctacccccgaccccggaatgttcccctgcctgcaccactcccagaacctcctgagggccgtgtccaacatgctgcagaaggctagacagaccctcgaattctacccctgtaccagcgaggagatcgaccatgaggacatcaccaaggataagaccagcaccgtggaggcttgcctgcctctggagctgaccaaaaacgagagctgcctgaacagcagggaaaccagcttcattaccaacggctcctgcctggcctccaggaagacatccttcatgatggccctgtgcctcagcagcatctacgaggacctgaagatgtatcaggtggagtttaagaccatgaatgccaagctgctgatggaccctaagaggcagatcttcctggaccagaatatgctggccgtgattgacgagctgatgcaggccctcaactttaacagcgagaccgtgccccagaaaagcagcctcgaagagcctgacttctacaaaaccaagattaagctgtgtatcctgctgcacgccttcaggatcagggccgtgaccatcgacagggtgatgagctacctgaacgccagcggatccaatctggcgctcagccttactgccgaccaaatggtatcagctcttctggacgcagaacccccaattctttattccgagtacgaccccacacgcccgttcagtgaagcttccatgatgggcctccttacgaaccttgccgaccgggaactcgtgcacatgatcaattgggcgaagcgggtgccggggttcgtagatttgacacttcacgaccaagttcatctcttggaatgtgcttggatggagatattgatgatcggactcgtgtggaggtcaatggagcatcctggtaaacttcttttcgcacccaatctgctcttggatagaaatcagggtaagtgcgtcgagggtggcgttgaaatcttcgacatgctccttgcgacatccagccgattccgaatgatgaatcttcaagtagaggaatttgtctgtcttaagagcattatactcctcaatagtggagtttacaccttcttgtcctctacactgaaatcacttgaggaaaaagatcacatacatagggtgttggataaaatcacggatacactcatacatctgatggcaaaagcaggattgaccctgcaacagcagcaccaacgactggcccaactgctgttgatccttagccatatcagacacatgtctaacaaaaggatggaacatttgtacagcatgaaatgtaagaacgtagtgccactgtccgatttgttgctggaaatgctggacgctcatcggctctaa

SEQ ID NO: 148 - protein, 787 aa, Artificial Sequence
  Description of Artificial Sequence: Synthetic Construct
MCHQQLVISWFSLVFLASPLVAIWELKKDVYVVELDWYPDAPGEMVVLTCDTPEEDGITWTLDQSSEVLGSGKTLTIQVKEFGDAGQYTCHKGGEVLSHSLLLLHKKEDGIWSTDILKDQKEPKNKTFLRCEAKNYSGRFTCWWLTTISTDLTFSVKSSRGSSDPQGVTCGAATLSAERVRGDNKEYEYSVECQEDSACPAAEESLPIEVMVDAVHKLKYENYTSSFFIRDIIKPDPPKNLQLKPLKNSRQVEVSWEYPDTWSTPHSYFSLTFCVQVQGKSKREKKDRVFTDKTSATVICRKNASISVRAQDRYYSSSWSEWASVPCSGGGGSGGGGSGGGGSRNLPVATPDPGMFPCLHHSQNLLRAVSNMLQKARQTLEFYPCTSEEIDHEDITKDKTSTVEACLPLELTKNESCLNSRETSFITNGSCLASRKTSFMMALCLSSIYEDLKMYQVEFKTMNAKLLMDPKRQIFLDQNMLAVIDELMQALNFNSETVPQKSSLEEPDFYKTKIKLCILLHAFRIRAVTIDRVMSYLNASGSNLALSLTADQMVSALLDAEPPILYSEYDPTRPFSEASMMGLLTNLADRELVHMINWAKRVPGFVDLTLHDQVHLLECAWMEILMIGLVWRSMEHPGKLLFAPNLLLDRNQGKCVEGGVEIFDMLLATSSRFRMMNLQVEEFVCLKSIILLNSGVYTFLSSTLKSLEEKDHIHRVLDKITDTLIHLMAKAGLTLQQQHQRLAQLLLILSHIRHMSNKRMEHLYSMKCKNVVPLSDLLLEMLDAHRL

SEQ ID NO: 149 - DNA, 2364 bp, Artificial Sequence
  Description of Artificial Sequence: Synthetic Construct
atgtgccaccaacagctcgtgatcagctggttctccctggtgttcctggctagccccctggtggccatctgggagctcaagaaagacgtgtacgtggtggaactggactggtaccccgacgcccctggcgaaatggtggtgctgacatgcgacacccctgaggaggatggcattacctggaccctcgatcagagctccgaggtgctgggcagcggcaaaaccctgaccatccaggtgaaggagtttggcgatgccggccagtacacatgtcacaagggcggcgaggtgctgagccactccctgctgctgctccacaagaaggaagatggcatctggagcaccgacattctgaaggatcagaaggagcccaagaacaagacattcctgaggtgtgaggccaagaactacagcggcaggtttacctgctggtggctgacaacaatcagcaccgacctcacattctccgtcaagtcctccaggggttcttccgaccctcaaggcgtgacatgcggcgctgccaccctgagcgctgagagagtcaggggcgacaacaaggagtacgagtacagcgtcgaatgtcaggaggacagcgcctgtcccgccgctgaagagagcctgcctatcgaggtgatggtggacgccgtgcacaaactgaagtatgagaattacacctccagcttcttcatcagggacatcatcaaacccgatccccccaagaacctgcagctgaagcctctgaagaacagcagacaggtcgaagtgtcctgggagtaccctgatacctggtccacaccccacagctacttcagcctgaccttttgcgtgcaggtgcagggcaagagcaaaagggagaagaaggacagggtgtttaccgacaagacctccgccacagtgatttgcagaaagaacgcctccatcagcgtgagggcccaggacaggtattacagcagctcctggagcgaatgggctagcgtgccctgtagcggaggaggaggcagcggaggaggaggttctggaggaggcggcagcagaaacctgcctgtcgctacccccgaccccggaatgttcccctgcctgcaccactcccagaacctcctgagggccgtgtccaacatgctgcagaaggctagacagaccctcgaattctacccctgtaccagcgaggagatcgaccatgaggacatcaccaaggataagaccagcaccgtggaggcttgcctgcctctggagctgaccaaaaacgagagctgcctgaacagcagggaaaccagcttcattaccaacggctcctgcctggcctccaggaagacatccttcatgatggccctgtgcctcagcagcatctacgaggacctgaagatgtatcaggtggagtttaagaccatgaatgccaagctgctgatggaccctaagaggcagatcttcctggaccagaatatgctggccgtgattgacgagctgatgcaggccctcaactttaacagcgagaccgtgccccagaaaagcagcctcgaagagcctgacttctacaaaaccaagattaagctgtgtatcctgctgcacgccttcaggatcagggccgtgaccatcgacagggtgatgagctacctgaacgccagcggatccaatctggcgctcagccttactgccgaccaaatggtatcagctcttctggacgcagaacccccaattctttattccgagtacgaccccacacgcccgttcagtgaagcttccatgatgggcctccttacgaaccttgccgaccgggaactcgtgcacatgatcaattgggcgaagcgggtgccggggttcgtagatttgacacttcacgaccaagttcatctcttggaatgtgcttggatggagatattgatgatcggactcgtgtggaggtcaatggagcatcctggtaaacttcttttcgcacccaatctgctcttggatagaaatcagggtaagtgcgtcgagggtggcgttgaaatcttcgacatgctccttgcgacatccagccgattccgaatgatgaatcttcaagtagaggaatttgtctgtcttaagagcattatactcctcaatagtggagtttacaccttcttgtcctctacactgaaatcacttgaggaaaaagatcacatacatagggtgttggataaaatcacggatacactcatacatctgatggcaaaagcaggattgaccctgcaacagcagcaccaacgactggcccaactgctgttgatccttagccatatcagacacatgtctaacaaaaggatggaacatttgtacagcatgaaatgtaagaacgtagtgccactgtccgatttgttgctggaaatgctggacgctcatcggctctaa

SEQ ID NO: 150 - DNA, 4444 bp, Artificial Sequence
  Description of Artificial Sequence: Synthetic Construct
atggccttaccagtgaccgccttgctcctgccgctggccttgctgctccacgccgccaggccggacatccagatgacacagactacatcctccctgtctgcctctctgggagacagagtcaccatcagttgcagggcaagtcaggacattagtaaatatttaaattggtatcagcagaaaccagatggaactgttaaactcctgatctaccatacatcaagattacactcaggagtcccatcaaggttcagtggcagtgggtctggaacagattattctctcaccattagcaacctggagcaagaagatattgccacttacttttgccaacagggtaatacgcttccgtacacgttcggaggggggaccaagctggagatcacaggtggcggtggctcgggcggtggtgggtcgggtggcggcggatctgaggtgaaactgcaggagtcaggacctggcctggtggcgccctcacagagcctgtccgtcacatgcactgtctcaggggtctcattacccgactatggtgtaagctggattcgccagcctccacgaaagggtctggagtggctgggagtaatatggggtagtgaaaccacatactataattcagctctcaaatccagactgaccatcatcaaggacaactccaagagccaagttttcttaaaaatgaacagtctgcaaactgatgacacagccatttactactgtgccaaacattattactacggtggtagctatgctatggactactggggccaaggaacctcagtcaccgtctcctcaaccacgacgccagcgccgcgaccaccaacaccggcgcccaccatcgcgtcgcagcccctgtccctgcgcccagaggcgtgccggccagcggcggggggcgcagtgcacacgagggggctggacttcgcctgtgatatctacatctgggcgcccttggccgggacttgtggggtccttctcctgtcactggttatcaccctttactgcaaacggggcagaaagaaactcctgtatatattcaaacaaccatttatgagaccagtacaaactactcaagaggaagatggctgtagctgccgatttccagaagaagaagaaggaggatgtgaactgagagtgaagttcagcaggagcgcagacgcccccgcgtacaagcagggccagaaccagctctataacgagctcaatctaggacgaagagaggagtacgatgttttggacaagagacgtggccgggaccctgagatggggggaaagccgagaaggaagaaccctcaggaaggcctgtacaatgaactgcagaaagataagatggcggaggcctacagtgagattgggatgaaaggcgagcgccggaggggcaaggggcacgatggcctttaccagggtctcagtacagccaccaaggacacctacgacgcccttcacatgcaggccctgccccctcgctaaatcgggctagccgcccctctccctcccccccccctaacgttactggccgaagccgcttggaataaggccggtgtgcgtttgtctatatgttattttccaccatattgccgtcttttggcaatgtgagggcccggaaacctggccctgtcttcttgacgagcattcctaggggtctttcccctctcgccaaaggaatgcaaggtctgttgaatgtcgtgaaggaagcagttcctctggaagcttcttgaagacaaacaacgtctgtagcgaccctttgcaggcagcggaaccccccacctggcgacaggtgcctctgcggccaaaagccacgtgtataagatacacctgcaaaggcggcacaaccccagtgccacgttgtgagttggatagttgtggaaagagtcaaatggctctcctcaagcgtattcaacaaggggctgaaggatgcccagaaggtaccccattgtatgggatctgatctggggcctcggtgcacatgctttacatgtgtttagtcgaggttaaaaaaacgtctaggccccccgaaccacggggacgtggttttcctttgaaaaacacgatgataagcttgccacaacccacaaggagacgaccttccatgtgccaccaacagctcgtgatcagctggttctccctggtgttcctggctagccccctggtggccatctgggagctcaagaaagacgtgtacgtggtggaactggactggtaccccgacgcccctggcgaaatggtggtgctgacatgcgacacccctgaggaggatggcattacctggaccctcgatcagagctccgaggtgctgggcagcggcaaaaccctgaccatccaggtgaaggagtttggcgatgccggccagtacacatgtcacaagggcggcgaggtgctgagccactccctgctgctgctccacaagaaggaagatggcatctggagcaccgacattctgaaggatcagaaggagcccaagaacaagacattcctgaggtgtgaggccaagaactacagcggcaggtttacctgctggtggctgacaacaatcagcaccgacctcacattctccgtcaagtcctccaggggttcttccgaccctcaaggcgtgacatgcggcgctgccaccctgagcgctgagagagtcaggggcgacaacaaggagtacgagtacagcgtcgaatgtcaggaggacagcgcctgtcccgccgctgaagagagcctgcctatcgaggtgatggtggacgccgtgcacaaactgaagtatgagaattacacctccagcttcttcatcagggacatcatcaaacccgatccccccaagaacctgcagctgaagcctctgaagaacagcagacaggtcgaagtgtcctgggagtaccctgatacctggtccacaccccacagctacttcagcctgaccttttgcgtgcaggtgcagggcaagagcaaaagggagaagaaggacagggtgtttaccgacaagacctccgccacagtgatttgcagaaagaacgcctccatcagcgtgagggcccaggacaggtattacagcagctcctggagcgaatgggctagcgtgccctgtagcggaggaggaggcagcggaggaggaggttctggaggaggcggcagcagaaacctgcctgtcgctacccccgaccccggaatgttcccctgcctgcaccactcccagaacctcctgagggccgtgtccaacatgctgcagaaggctagacagaccctcgaattctacccctgtaccagcgaggagatcgaccatgaggacatcaccaaggataagaccagcaccgtggaggcttgcctgcctctggagctgaccaaaaacgagagctgcctgaacagcagggaaaccagcttcattaccaacggctcctgcctggcctccaggaagacatccttcatgatggccctgtgcctcagcagcatctacgaggacctgaagatgtatcaggtggagtttaagaccatgaatgccaagctgctgatggaccctaagaggcagatcttcctggaccagaatatgctggccgtgattgacgagctgatgcaggccctcaactttaacagcgagaccgtgccccagaaaagcagcctcgaagagcctgacttctacaaaaccaagattaagctgtgtatcctgctgcacgccttcaggatcagggccgtgaccatcgacagggtgatgagctacctgaacgccagcggatcctcactggcgctcagccttactgccgaccaaatggtatcagctcttctggacgcagaacccccaattctttattccgagtacgaccccacaggcccgttcagtgaagcttccatgatgggcctccttacgaaccttgccgaccgggaactcgtgcacatgatcaattgggcgaagcgggtgccggggttcgtagatttgacacttcacgaccaagttcatctcttggaatgtgcttggatggagatattgatgatcggactcgtgtggaggtcaatggagcatcctggtaaacttcttttcgcacccaatctgctcttggatagaaatcagggtaagtgcgtcgagggtggcgttgaaatcttcgacatgctccttgcgacatccagccgattccgaatgatgaatcttcaaggagaggaatttgtctgtcttaagagcattatactcctcaatagtggagtttacaccttcttgtcctctacactgaaatcacttgaggaaaaagatcacatacatagggtgttggataaaatcacggatacactcatacatctgatggcaaaagcaggattgaccctgcaacagcagcaccaacgactggcccaactgctgttgatccttagccatatcagacacatgtctagcaaaaggatggaacatttgtacagcatgaaatgtaagaacgtagtgccactgtccgatttgttgctggaaatgctggacgctcatcggctctaa

SEQ ID NO: 151 - protein, 787 aa, Artificial Sequence
  Description of Artificial Sequence: Synthetic Construct
MCHQQLVISWFSLVFLASPLVAIWELKKDVYVVELDWYPDAPGEMVVLTCDTPEEDGITWTLDQSSEVLGSGKTLTIQVKEFGDAGQYTCHKGGEVLSHSLLLLHKKEDGIWSTDILKDQKEPKNKTFLRCEAKNYSGRFTCWWLTTISTDLTFSVKSSRGSSDPQGVTCGAATLSAERVRGDNKEYEYSVECQEDSACPAAEESLPIEVMVDAVHKLKYENYTSSFFIRDIIKPDPPKNLQLKPLKNSRQVEVSWEYPDTWSTPHSYFSLTFCVQVQGKSKREKKDRVFTDKTSATVICRKNASISVRAQDRYYSSSWSEWASVPCSGGGGSGGGGSGGGGSRNLPVATPDPGMFPCLHHSQNLLRAVSNMLQKARQTLEFYPCTSEEIDHEDITKDKTSTVEACLPLELTKNESCLNSRETSFITNGSCLASRKTSFMMALCLSSIYEDLKMYQVEFKTMNAKLLMDPKRQIFLDQNMLAVIDELMQALNFNSETVPQKSSLEEPDFYKTKIKLCILLHAFRIRAVTIDRVMSYLNASGSSLALSLTADQMVSALLDAEPPILYSEYDPTGPFSEASMMGLLTNLADRELVHMINWAKRVPGFVDLTLHDQVHLLECAWMEILMIGLVWRSMEHPGKLLFAPNLLLDRNQGKCVEGGVEIFDMLLATSSRFRMMNLQGEEFVCLKSIILLNSGVYTFLSSTLKSLEEKDHIHRVLDKITDTLIHLMAKAGLTLQQQHQRLAQLLLILSHIRHMSSKRMEHLYSMKCKNVVPLSDLLLEMLDAHRL

SEQ ID NO: 152 - DNA, 2364 bp, Artificial Sequence
  Description of Artificial Sequence: Synthetic Construct
atgtgccaccaacagctcgtgatcagctggttctccctggtgttcctggctagccccctggtggccatctgggagctcaagaaagacgtgtacgtggtggaactggactggtaccccgacgcccctggcgaaatggtggtgctgacatgcgacacccctgaggaggatggcattacctggaccctcgatcagagctccgaggtgctgggcagcggcaaaaccctgaccatccaggtgaaggagtttggcgatgccggccagtacacatgtcacaagggcggcgaggtgctgagccactccctgctgctgctccacaagaaggaagatggcatctggagcaccgacattctgaaggatcagaaggagcccaagaacaagacattcctgaggtgtgaggccaagaactacagcggcaggtttacctgctggtggctgacaacaatcagcaccgacctcacattctccgtcaagtcctccaggggttcttccgaccctcaaggcgtgacatgcggcgctgccaccctgagcgctgagagagtcaggggcgacaacaaggagtacgagtacagcgtcgaatgtcaggaggacagcgcctgtcccgccgctgaagagagcctgcctatcgaggtgatggtggacgccgtgcacaaactgaagtatgagaattacacctccagcttcttcatcagggacatcatcaaacccgatccccccaagaacctgcagctgaagcctctgaagaacagcagacaggtcgaagtgtcctgggagtaccctgatacctggtccacaccccacagctacttcagcctgaccttttgcgtgcaggtgcagggcaagagcaaaagggagaagaaggacagggtgtttaccgacaagacctccgccacagtgatttgcagaaagaacgcctccatcagcgtgagggcccaggacaggtattacagcagctcctggagcgaatgggctagcgtgccctgtagcggaggaggaggcagcggaggaggaggttctggaggaggcggcagcagaaacctgcctgtcgctacccccgaccccggaatgttcccctgcctgcaccactcccagaacctcctgagggccgtgtccaacatgctgcagaaggctagacagaccctcgaattctacccctgtaccagcgaggagatcgaccatgaggacatcaccaaggataagaccagcaccgtggaggcttgcctgcctctggagctgaccaaaaacgagagctgcctgaacagcagggaaaccagcttcattaccaacggctcctgcctggcctccaggaagacatccttcatgatggccctgtgcctcagcagcatctacgaggacctgaagatgtatcaggtggagtttaagaccatgaatgccaagctgctgatggaccctaagaggcagatcttcctggaccagaatatgctggccgtgattgacgagctgatgcaggccctcaactttaacagcgagaccgtgccccagaaaagcagcctcgaagagcctgacttctacaaaaccaagattaagctgtgtatcctgctgcacgccttcaggatcagggccgtgaccatcgacagggtgatgagctacctgaacgccagcggatcctcactggcgctcagccttactgccgaccaaatggtatcagctcttctggacgcagaacccccaattctttattccgagtacgaccccacaggcccgttcagtgaagcttccatgatgggcctccttacgaaccttgccgaccgggaactcgtgcacatgatcaattgggcgaagcgggtgccggggttcgtagatttgacacttcacgaccaagttcatctcttggaatgtgcttggatggagatattgatgatcggactcgtgtggaggtcaatggagcatcctggtaaacttcttttcgcacccaatctgctcttggatagaaatcagggtaagtgcgtcgagggtggcgttgaaatcttcgacatgctccttgcgacatccagccgattccgaatgatgaatcttcaaggagaggaatttgtctgtcttaagagcattatactcctcaatagtggagtttacaccttcttgtcctctacactgaaatcacttgaggaaaaagatcacatacatagggtgttggataaaatcacggatacactcatacatctgatggcaaaagcaggattgaccctgcaacagcagcaccaacgactggcccaactgctgttgatccttagccatatcagacacatgtctagcaaaaggatggaacatttgtacagcatgaaatgtaagaacgtagtgccactgtccgatttgttgctggaaatgctggacgctcatcggctctaa

SEQ ID NO: 153 - DNA, 4444 bp, Artificial Sequence
  Description of Artificial Sequence: Synthetic Construct
atggccttaccagtgaccgccttgctcctgccgctggccttgctgctccacgccgccaggccggacatccagatgacacagactacatcctccctgtctgcctctctgggagacagagtcaccatcagttgcagggcaagtcaggacattagtaaatatttaaattggtatcagcagaaaccagatggaactgttaaactcctgatctaccatacatcaagattacactcaggagtcccatcaaggttcagtggcagtgggtctggaacagattattctctcaccattagcaacctggagcaagaagatattgccacttacttttgccaacagggtaatacgcttccgtacacgttcggaggggggaccaagctggagatcacaggtggcggtggctcgggcggtggtgggtcgggtggcggcggatctgaggtgaaactgcaggagtcaggacctggcctggtggcgccctcacagagcctgtccgtcacatgcactgtctcaggggtctcattacccgactatggtgtaagctggattcgccagcctccacgaaagggtctggagtggctgggagtaatatggggtagtgaaaccacatactataattcagctctcaaatccagactgaccatcatcaaggacaactccaagagccaagttttcttaaaaatgaacagtctgcaaactgatgacacagccatttactactgtgccaaacattattactacggtggtagctatgctatggactactggggccaaggaacctcagtcaccgtctcctcaaccacgacgccagcgccgcgaccaccaacaccggcgcccaccatcgcgtcgcagcccctgtccctgcgcccagaggcgtgccggccagcggcggggggcgcagtgcacacgagggggctggacttcgcctgtgatatctacatctgggcgcccttggccgggacttgtggggtccttctcctgtcactggttatcaccctttactgcaaacggggcagaaagaaactcctgtatatattcaaacaaccatttatgagaccagtacaaactactcaagaggaagatggctgtagctgccgatttccagaagaagaagaaggaggatgtgaactgagagtgaagttcagcaggagcgcagacgcccccgcgtacaagcagggccagaaccagctctataacgagctcaatctaggacgaagagaggagtacgatgttttggacaagagacgtggccgggaccctgagatggggggaaagccgagaaggaagaaccctcaggaaggcctgtacaatgaactgcagaaagataagatggcggaggcctacagtgagattgggatgaaaggcgagcgccggaggggcaaggggcacgatggcctttaccagggtctcagtacagccaccaaggacacctacgacgcccttcacatgcaggccctgccccctcgctaaatcgggctagccgcccctctccctcccccccccctaacgttactggccgaagccgcttggaataaggccggtgtgcgtttgtctatatgttattttccaccatattgccgtcttttggcaatgtgagggcccggaaacctggccctgtcttcttgacgagcattcctaggggtctttcccctctcgccaaaggaatgcaaggtctgttgaatgtcgtgaaggaagcagttcctctggaagcttcttgaagacaaacaacgtctgtagcgaccctttgcaggcagcggaaccccccacctggcgacaggtgcctctgcggccaaaagccacgtgtataagatacacctgcaaaggcggcacaaccccagtgccacgttgtgagttggatagttgtggaaagagtcaaatggctctcctcaagcgtattcaacaaggggctgaaggatgcccagaaggtaccccattgtatgggatctgatctggggcctcggtgcacatgctttacatgtgtttagtcgaggttaaaaaaacgtctaggccccccgaaccacggggacgtggttttcctttgaaaaacacgatgataagcttgccacaacccacaaggagacgaccttccatgtgccaccaacagctcgtgatcagctggttctccctggtgttcctggctagccccctggtggccatctgggagctcaagaaagacgtgtacgtggtggaactggactggtaccccgacgcccctggcgaaatggtggtgctgacatgcgacacccctgaggaggatggcattacctggaccctcgatcagagctccgaggtgctgggcagcggcaaaaccctgaccatccaggtgaaggagtttggcgatgccggccagtacacatgtcacaagggcggcgaggtgctgagccactccctgctgctgctccacaagaaggaagatggcatctggagcaccgacattctgaaggatcagaaggagcccaagaacaagacattcctgaggtgtgaggccaagaactacagcggcaggtttacctgctggtggctgacaacaatcagcaccgacctcacattctccgtcaagtcctccaggggttcttccgaccctcaaggcgtgacatgcggcgctgccaccctgagcgctgagagagtcaggggcgacaacaaggagtacgagtacagcgtcgaatgtcaggaggacagcgcctgtcccgccgctgaagagagcctgcctatcgaggtgatggtggacgccgtgcacaaactgaagtatgagaattacacctccagcttcttcatcagggacatcatcaaacccgatccccccaagaacctgcagctgaagcctctgaagaacagcagacaggtcgaagtgtcctgggagtaccctgatacctggtccacaccccacagctacttcagcctgaccttttgcgtgcaggtgcagggcaagagcaaaagggagaagaaggacagggtgtttaccgacaagacctccgccacagtgatttgcagaaagaacgcctccatcagcgtgagggcccaggacaggtattacagcagctcctggagcgaatgggctagcgtgccctgtagcggaggaggaggcagcggaggaggaggttctggaggaggcggcagcagaaacctgcctgtcgctacccccgaccccggaatgttcccctgcctgcaccactcccagaacctcctgagggccgtgtccaacatgctgcagaaggctagacagaccctcgaattctacccctgtaccagcgaggagatcgaccatgaggacatcaccaaggataagaccagcaccgtggaggcttgcctgcctctggagctgaccaaaaacgagagctgcctgaacagcagggaaaccagcttcattaccaacggctcctgcctggcctccaggaagacatccttcatgatggccctgtgcctcagcagcatctacgaggacctgaagatgtatcaggtggagtttaagaccatgaatgccaagctgctgatggaccctaagaggcagatcttcctggaccagaatatgctggccgtgattgacgagctgatgcaggccctcaactttaacagcgagaccgtgccccagaaaagcagcctcgaagagcctgacttctacaaaaccaagattaagctgtgtatcctgctgcacgccttcaggatcagggccgtgaccatcgacagggtgatgagctacctgaacgccagcggatcctcactggcgctcagccttactgccgaccaaatggtatcagctcttctggacgcagaacccccaattctttattccgagtacgaccccacacgcccgttcagtgaagcttccatgatgggcctccttacgaaccttgccgaccgggaactcgtgcacatgatcaattgggcgaagcgggtgccggggttcgtagatttgacacttcacgaccaagttcatctcttggaatgtgcttggatggagatattgatgatcggactcgtgtggaggtcaatggagcatcctggtaaacttcttttcgcacccaatctgctcttggatagaaatcagggtaagtgcgtcgagggtggcgttgaaatcttcgacatgctccttgcgacatccagccgattccgaatgatgaatcttcaaggagaggaatttgtctgtcttaagagcattatactcctcaatagtggagtttacaccttcttgtcctctacactgaaatcacttgaggaaaaagatcacatacatagggtgttggataaaatcacggatacactcatacatctgatggcaaaagcaggattgaccctgcaacagcagcaccaacgactggcccaactgctgttgatccttagccatatcagacacatgtctaacaaaaggatggaacatttgtacagcatgaaatgtaagaacgtagtgccactgtccgatttgttgctggaaatgctggacgctcatcggctctaa

SEQ ID NO: 154 - protein, 787 aa, Artificial Sequence
  Description of Artificial Sequence: Synthetic Construct
MCHQQLVISWFSLVFLASPLVAIWELKKDVYVVELDWYPDAPGEMVVLTCDTPEEDGITWTLDQSSEVLGSGKTLTIQVKEFGDAGQYTCHKGGEVLSHSLLLLHKKEDGIWSTDILKDQKEPKNKTFLRCEAKNYSGRFTCWWLTTISTDLTFSVKSSRGSSDPQGVTCGAATLSAERVRGDNKEYEYSVECQEDSACPAAEESLPIEVMVDAVHKLKYENYTSSFFIRDIIKPDPPKNLQLKPLKNSRQVEVSWEYPDTWSTPHSYFSLTFCVQVQGKSKREKKDRVFTDKTSATVICRKNASISVRAQDRYYSSSWSEWASVPCSGGGGSGGGGSGGGGSRNLPVATPDPGMFPCLHHSQNLLRAVSNMLQKARQTLEFYPCTSEEIDHEDITKDKTSTVEACLPLELTKNESCLNSRETSFITNGSCLASRKTSFMMALCLSSIYEDLKMYQVEFKTMNAKLLMDPKRQIFLDQNMLAVIDELMQALNFNSETVPQKSSLEEPDFYKTKIKLCILLHAFRIRAVTIDRVMSYLNASGSSLALSLTADQMVSALLDAEPPILYSEYDPTRPFSEASMMGLLTNLADRELVHMINWAKRVPGFVDLTLHDQVHLLECAWMEILMIGLVWRSMEHPGKLLFAPNLLLDRNQGKCVEGGVEIFDMLLATSSRFRMMNLQGEEFVCLKSIILLNSGVYTFLSSTLKSLEEKDHIHRVLDKITDTLIHLMAKAGLTLQQQHQRLAQLLLILSHIRHMSNKRMEHLYSMKCKNVVPLSDLLLEMLDAHRL

SEQ ID NO: 155 - DNA, 2364 bp, Artificial Sequence
  Description of Artificial Sequence: Synthetic Construct
atgtgccaccaacagctcgtgatcagctggttctccctggtgttcctggctagccccctggtggccatctgggagctcaagaaagacgtgtacgtggtggaactggactggtaccccgacgcccctggcgaaatggtggtgctgacatgcgacacccctgaggaggatggcattacctggaccctcgatcagagctccgaggtgctgggcagcggcaaaaccctgaccatccaggtgaaggagtttggcgatgccggccagtacacatgtcacaagggcggcgaggtgctgagccactccctgctgctgctccacaagaaggaagatggcatctggagcaccgacattctgaaggatcagaaggagcccaagaacaagacattcctgaggtgtgaggccaagaactacagcggcaggtttacctgctggtggctgacaacaatcagcaccgacctcacattctccgtcaagtcctccaggggttcttccgaccctcaaggcgtgacatgcggcgctgccaccctgagcgctgagagagtcaggggcgacaacaaggagtacgagtacagcgtcgaatgtcaggaggacagcgcctgtcccgccgctgaagagagcctgcctatcgaggtgatggtggacgccgtgcacaaactgaagtatgagaattacacctccagcttcttcatcagggacatcatcaaacccgatccccccaagaacctgcagctgaagcctctgaagaacagcagacaggtcgaagtgtcctgggagtaccctgatacctggtccacaccccacagctacttcagcctgaccttttgcgtgcaggtgcagggcaagagcaaaagggagaagaaggacagggtgtttaccgacaagacctccgccacagtgatttgcagaaagaacgcctccatcagcgtgagggcccaggacaggtattacagcagctcctggagcgaatgggctagcgtgccctgtagcggaggaggaggcagcggaggaggaggttctggaggaggcggcagcagaaacctgcctgtcgctacccccgaccccggaatgttcccctgcctgcaccactcccagaacctcctgagggccgtgtccaacatgctgcagaaggctagacagaccctcgaattctacccctgtaccagcgaggagatcgaccatgaggacatcaccaaggataagaccagcaccgtggaggcttgcctgcctctggagctgaccaaaaacgagagctgcctgaacagcagggaaaccagcttcattaccaacggctcctgcctggcctccaggaagacatccttcatgatggccctgtgcctcagcagcatctacgaggacctgaagatgtatcaggtggagtttaagaccatgaatgccaagctgctgatggaccctaagaggcagatcttcctggaccagaatatgctggccgtgattgacgagctgatgcaggccctcaactttaacagcgagaccgtgccccagaaaagcagcctcgaagagcctgacttctacaaaaccaagattaagctgtgtatcctgctgcacgccttcaggatcagggccgtgaccatcgacagggtgatgagctacctgaacgccagcggatcctcactggcgctcagccttactgccgaccaaatggtatcagctcttctggacgcagaacccccaattctttattccgagtacgaccccacacgcccgttcagtgaagcttccatgatgggcctccttacgaaccttgccgaccgggaactcgtgcacatgatcaattgggcgaagcgggtgccggggttcgtagatttgacacttcacgaccaagttcatctcttggaatgtgcttggatggagatattgatgatcggactcgtgtggaggtcaatggagcatcctggtaaacttcttttcgcacccaatctgctcttggatagaaatcagggtaagtgcgtcgagggtggcgttgaaatcttcgacatgctccttgcgacatccagccgattccgaatgatgaatcttcaaggagaggaatttgtctgtcttaagagcattatactcctcaatagtggagtttacaccttcttgtcctctacactgaaatcacttgaggaaaaagatcacatacatagggtgttggataaaatcacggatacactcatacatctgatggcaaaagcaggattgaccctgcaacagcagcaccaacgactggcccaactgctgttgatccttagccatatcagacacatgtctaacaaaaggatggaacatttgtacagcatgaaatgtaagaacgtagtgccactgtccgatttgttgctggaaatgctggacgctcatcggctctaa

SEQ ID NO: 156 - protein, 1294 aa, Artificial Sequence
  Description of Artificial Sequence: Synthetic Construct
MALPVTALLLPLALLLHAARPDIQMTQTTSSLSASLGDRVTISCRASQDISKYLNWYQQKPDGTVKLLIYHTSRLHSGVPSRFSGSGSGTDYSLTISNLEQEDIATYFCQQGNTLPYTFGGGTKLEITGGGGSGGGGSGGGGSEVKLQESGPGLVAPSQSLSVTCTVSGVSLPDYGVSWIRQPPRKGLEWLGVIWGSETTYYNSALKSRLTIIKDNSKSQVFLKMNSLQTDDTAIYYCAKHYYYGGSYAMDYWGQGTSVTVSSTTTPAPRPPTPAPTIASQPLSLRPEACRPAAGGAVHTRGLDFACDIYIWAPLAGTCGVLLLSLVITLYCKRGRKKLLYIFKQPFMRPVQTTQEEDGCSCRFPEEEEGGCELRVKFSRSADAPAYKQGQNQLYNELNLGRREEYDVLDKRRGRDPEMGGKPRRKNPQEGLYNELQKDKMAEAYSEIGMKGERRRGKGHDGLYQGLSTATKDTYDALHMQALPPRGSATNFSLLKQAGDVEENPGPMCHQQLVISWFSLVFLASPLVAIWELKKDVYVVELDWYPDAPGEMVVLTCDTPEEDGITWTLDQSSEVLGSGKTLTIQVKEFGDAGQYTCHKGGEVLSHSLLLLHKKEDGIWSTDILKDQKEPKNKTFLRCEAKNYSGRFTCWWLTTISTDLTFSVKSSRGSSDPQGVTCGAATLSAERVRGDNKEYEYSVECQEDSACPAAEESLPIEVMVDAVHKLKYENYTSSFFIRDIIKPDPPKNLQLKPLKNSRQVEVSWEYPDTWSTPHSYFSLTFCVQVQGKSKREKKDRVFTDKTSATVICRKNASISVRAQDRYYSSSWSEWASVPCSGGGGSGGGGSGGGGSRNLPVATPDPGMFPCLHHSQNLLRAVSNMLQKARQTLEFYPCTSEEIDHEDITKDKTSTVEACLPLELTKNESCLNSRETSFITNGSCLASRKTSFMMALCLSSIYEDLKMYQVEFKTMNAKLLMDPKRQIFLDQNMLAVIDELMQALNFNSETVPQKSSLEEPDFYKTKIKLCILLHAFRIRAVTIDRVMSYLNASGSSLALSLTADQMVSALLDAEPPILYSEYDPTRPFSEASMMGLLTNLADRELVHMINWAKRVPGFVDLTLHDQVHLLECAWMEILMIGLVWRSMEHPGKLLFAPNLLLDRDQGKCVEGGVEIFDMLLATSSRFRMMNLQGEEFVCLKSIILLNSGVYTFLSSTLKSLEEKDHIHRVLDKITDTLIHLMAKAGLTLQQQHQRLAQLLLILSHIRHMSNKRMEHLYSMKCKNVVPLSDLLLEMLDAHRL

SEQ ID NO: 157 - DNA, 3885 bp, Artificial Sequence
  Description of Artificial Sequence: Synthetic Construct
atggccttaccagtgaccgccttgctcctgccgctggccttgctgctccacgccgccaggccggacatccagatgacacagactacatcctccctgtctgcctctctgggagacagagtcaccatcagttgcagggcaagtcaggacattagtaaatatttaaattggtatcagcagaaaccagatggaactgttaaactcctgatctaccatacatcaagattacactcaggagtcccatcaaggttcagtggcagtgggtctggaacagattattctctcaccattagcaacctggagcaagaagatattgccacttacttttgccaacagggtaatacgcttccgtacacgttcggaggggggaccaagctggagatcacaggtggcggtggctcgggcggtggtgggtcgggtggcggcggatctgaggtgaaactgcaggagtcaggacctggcctggtggcgccctcacagagcctgtccgtcacatgcactgtctcaggggtctcattacccgactatggtgtaagctggattcgccagcctccacgaaagggtctggagtggctgggagtaatatggggtagtgaaaccacatactataattcagctctcaaatccagactgaccatcatcaaggacaactccaagagccaagttttcttaaaaatgaacagtctgcaaactgatgacacagccatttactactgtgccaaacattattactacggtggtagctatgctatggactactggggccaaggaacctcagtcaccgtctcctcaaccacgacgccagcgccgcgaccaccaacaccggcgcccaccatcgcgtcgcagcccctgtccctgcgcccagaggcgtgccggccagcggcggggggcgcagtgcacacgagggggctggacttcgcctgtgatatctacatctgggcgcccttggccgggacttgtggggtccttctcctgtcactggttatcaccctttactgcaaacggggcagaaagaaactcctgtatatattcaaacaaccatttatgagaccagtacaaactactcaagaggaagatggctgtagctgccgatttccagaagaagaagaaggaggatgtgaactgagagtgaagttcagcaggagcgcagacgcccccgcgtacaagcagggccagaaccagctctataacgagctcaatctaggacgaagagaggagtacgatgttttggacaagagacgtggccgggaccctgagatggggggaaagccgagaaggaagaaccctcaggaaggcctgtacaatgaactgcagaaagataagatggcggaggcctacagtgagattgggatgaaaggcgagcgccggaggggcaaggggcacgatggcctttaccagggtctcagtacagccaccaaggacacctacgacgcccttcacatgcaggccctgccccctcgcggatcagctactaacttcagcctgctgaagcaggctggagacgtggaggagaaccctggacctatgtgccaccaacagctcgtgatcagctggttctccctggtgttcctggctagccccctggtggccatctgggagctcaagaaagacgtgtacgtggtggaactggactggtaccccgacgcccctggcgaaatggtggtgctgacatgcgacacccctgaggaggatggcattacctggaccctcgatcagagctccgaggtgctgggcagcggcaaaaccctgaccatccaggtgaaggagtttggcgatgccggccagtacacatgtcacaagggcggcgaggtgctgagccactccctgctgctgctccacaagaaggaagatggcatctggagcaccgacattctgaaggatcagaaggagcccaagaacaagacattcctgaggtgtgaggccaagaactacagcggcaggtttacctgctggtggctgacaacaatcagcaccgacctcacattctccgtcaagtcctccaggggttcttccgaccctcaaggcgtgacatgcggcgctgccaccctgagcgctgagagagtcaggggcgacaacaaggagtacgagtacagcgtcgaatgtcaggaggacagcgcctgtcccgccgctgaagagagcctgcctatcgaggtgatggtggacgccgtgcacaaactgaagtatgagaattacacctccagcttcttcatcagggacatcatcaaacccgatccccccaagaacctgcagctgaagcctctgaagaacagcagacaggtcgaagtgtcctgggagtaccctgatacctggtccacaccccacagctacttcagcctgaccttttgcgtgcaggtgcagggcaagagcaaaagggagaagaaggacagggtgtttaccgacaagacctccgccacagtgatttgcagaaagaacgcctccatcagcgtgagggcccaggacaggtattacagcagctcctggagcgaatgggctagcgtgccctgtagcggaggaggaggcagcggaggaggaggttctggaggaggcggcagcagaaacctgcctgtcgctacccccgaccccggaatgttcccctgcctgcaccactcccagaacctcctgagggccgtgtccaacatgctgcagaaggctagacagaccctcgaattctacccctgtaccagcgaggagatcgaccatgaggacatcaccaaggataagaccagcaccgtggaggcttgcctgcctctggagctgaccaaaaacgagagctgcctgaacagcagggaaaccagcttcattaccaacggctcctgcctggcctccaggaagacatccttcatgatggccctgtgcctcagcagcatctacgaggacctgaagatgtatcaggtggagtttaagaccatgaatgccaagctgctgatggaccctaagaggcagatcttcctggaccagaatatgctggccgtgattgacgagctgatgcaggccctcaactttaacagcgagaccgtgccccagaaaagcagcctcgaagagcctgacttctacaaaaccaagattaagctgtgtatcctgctgcacgccttcaggatcagggccgtgaccatcgacagggtgatgagctacctgaacgccagcggatcctcactggcgctcagccttactgccgaccaaatggtatcagctcttctggacgcagaacccccaattctttattccgagtacgaccccacacgcccgttcagtgaagcttccatgatgggcctccttacgaaccttgccgaccgggaactcgtgcacatgatcaattgggcgaagcgggtgccggggttcgtagatttgacacttcacgaccaagttcatctcttggaatgtgcttggatggagatattgatgatcggactcgtgtggaggtcaatggagcatcctggtaaacttcttttcgcacccaatctgctcttggatagagatcagggtaagtgcgtcgagggtggcgttgaaatcttcgacatgctccttgcgacatccagccgattccgaatgatgaatcttcaaggagaggaatttgtctgtcttaagagcattatactcctcaatagtggagtttacaccttcttgtcctctacactgaaatcacttgaggaaaaagatcacatacatagggtgttggataaaatcacggatacactcatacatctgatggcaaaagcaggattgaccctgcaacagcagcaccaacgactggcccaactgctgttgatccttagccatatcagacacatgtctaacaaaaggatggaacatttgtacagcatgaaatgtaagaacgtagtgccactgtccgatttgttgctggaaatgctggacgctcatcggctctga

SEQ ID NO: 158 - protein, 542 aa, Artificial Sequence
  Description of Artificial Sequence: Synthetic Construct
MCHQQLVISWFSLVFLASPLVAIWELKKDVYVVELDWYPDAPGEMVVLTCDTPEEDGITWTLDQSSEVLGSGKTLTIQVKEFGDAGQYTCHKGGEVLSHSLLLLHKKEDGIWSTDILKDQKEPKNKTFLRCEAKNYSGRFTCWWLTTISTDLTFSVKSSRGSSDPQGVTCGAATLSAERVRGDNKEYEYSVECQEDSACPAAEESLPIEVMVDAVHKLKYENYTSSFFIRDIIKPDPPKNLQLKPLKNSRQVEVSWEYPDTWSTPHSYFSLTFCVQVQGKSKREKKDRVFTDKTSATVICRKNASISVRAQDRYYSSSWSEWASVPCSGGGGSGGGGSGGGGSRNLPVATPDPGMFPCLHHSQNLLRAVSNMLQKARQTLEFYPCTSEEIDHEDITKDKTSTVEACLPLELTKNESCLNSRETSFITNGSCLASRKTSFMMALCLSSIYEDLKMYQVEFKTMNAKLLMDPKRQIFLDQNMLAVIDELMQALNFNSETVPQKSSLEEPDFYKTKIKLCILLHAFRIRAVTIDRVMSYLNASGS

SEQ ID NO: 159 - DNA, 1629 bp, Artificial Sequence
  Description of Artificial Sequence: Synthetic Construct
atgtgccaccaacagctcgtgatcagctggttctccctggtgttcctggctagccccctggtggccatctgggagctcaagaaagacgtgtacgtggtggaactggactggtaccccgacgcccctggcgaaatggtggtgctgacatgcgacacccctgaggaggatggcattacctggaccctcgatcagagctccgaggtgctgggcagcggcaaaaccctgaccatccaggtgaaggagtttggcgatgccggccagtacacatgtcacaagggcggcgaggtgctgagccactccctgctgctgctccacaagaaggaagatggcatctggagcaccgacattctgaaggatcagaaggagcccaagaacaagacattcctgaggtgtgaggccaagaactacagcggcaggtttacctgctggtggctgacaacaatcagcaccgacctcacattctccgtcaagtcctccaggggttcttccgaccctcaaggcgtgacatgcggcgctgccaccctgagcgctgagagagtcaggggcgacaacaaggagtacgagtacagcgtcgaatgtcaggaggacagcgcctgtcccgccgctgaagagagcctgcctatcgaggtgatggtggacgccgtgcacaaactgaagtatgagaattacacctccagcttcttcatcagggacatcatcaaacccgatccccccaagaacctgcagctgaagcctctgaagaacagcagacaggtcgaagtgtcctgggagtaccctgatacctggtccacaccccacagctacttcagcctgaccttttgcgtgcaggtgcagggcaagagcaaaagggagaagaaggacagggtgtttaccgacaagacctccgccacagtgatttgcagaaagaacgcctccatcagcgtgagggcccaggacaggtattacagcagctcctggagcgaatgggctagcgtgccctgtagcggaggaggaggcagcggaggaggaggttctggaggaggcggcagcagaaacctgcctgtcgctacccccgaccccggaatgttcccctgcctgcaccactcccagaacctcctgagggccgtgtccaacatgctgcagaaggctagacagaccctcgaattctacccctgtaccagcgaggagatcgaccatgaggacatcaccaaggataagaccagcaccgtggaggcttgcctgcctctggagctgaccaaaaacgagagctgcctgaacagcagggaaaccagcttcattaccaacggctcctgcctggcctccaggaagacatccttcatgatggccctgtgcctcagcagcatctacgaggacctgaagatgtatcaggtggagtttaagaccatgaatgccaagctgctgatggaccctaagaggcagatcttcctggaccagaatatgctggccgtgattgacgagctgatgcaggccctcaactttaacagcgagaccgtgccccagaaaagcagcctcgaagagcctgacttctacaaaaccaagattaagctgtgtatcctgctgcacgccttcaggatcagggccgtgaccatcgacagggtgatgagctacctgaacgccagcggatcctaa

SEQ ID NO: 160 - protein, 789 aa, Artificial Sequence
  Description of Artificial Sequence: Synthetic Construct
MCHQQLVISWFSLVFLASPLVAGSSLALSLTADQMVSALLDAEPPILYSEYDPTRPFSEASMMGLLTNLADRELVHMINWAKRVPGFVDLALHDQVHLLECAWMEILMIGLVWRSMEHPGKLLFAPNLLLDRNQGKCVEGGVEIFDMLLATSSRFRMMNLQGEEFVCLKSIILLNSGVYTFLSSTLKSLEEKDHIHRVLDKITDTLIHLMAKAGLTLQQQHQRLAQLLLILSHIRHMSSKRMEHLYSMKCKNVVPLSDLLLEMLDAHRLGSIWELKKDVYVVELDWYPDAPGEMVVLTCDTPEEDGITWTLDQSSEVLGSGKTLTIQVKEFGDAGQYTCHKGGEVLSHSLLLLHKKEDGIWSTDILKDQKEPKNKTFLRCEAKNYSGRFTCWWLTTISTDLTFSVKSSRGSSDPQGVTCGAATLSAERVRGDNKEYEYSVECQEDSACPAAEESLPIEVMVDAVHKLKYENYTSSFFIRDIIKPDPPKNLQLKPLKNSRQVEVSWEYPDTWSTPHSYFSLTFCVQVQGKSKREKKDRVFTDKTSATVICRKNASISVRAQDRYYSSSWSEWASVPCSGGGGSGGGGSGGGGSRNLPVATPDPGMFPCLHHSQNLLRAVSNMLQKARQTLEFYPCTSEEIDHEDITKDKTSTVEACLPLELTKNESCLNSRETSFITNGSCLASRKTSFMMALCLSSIYEDLKMYQVEFKTMNAKLLMDPKRQIFLDQNMLAVIDELMQALNFNSETVPQKSSLEEPDFYKTKIKLCILLHAFRIRAVTIDRVMSYLNAS

SEQ ID NO: 161 - DNA, 2370 bp, Artificial Sequence
  Description of Artificial Sequence: Synthetic Construct
atgtgccaccaacagctcgtgatcagctggttctccctggtgttcctggctagccccctggtggccggatcatcactggcgctcagccttactgccgaccaaatggtatcagctcttctggacgcagaacccccaattctttattccgagtacgaccccacacgcccgttcagtgaagcttccatgatgggcctccttacgaaccttgccgaccgggaactcgtgcacatgatcaattgggcgaagcgggtgccggggttcgtagatttggcacttcacgaccaagttcatctcttggaatgtgcttggatggagatattgatgatcggactcgtgtggaggtcaatggagcatcctggtaaacttcttttcgcacccaatctgctcttggatagaaatcagggtaagtgcgtcgagggtggcgttgaaatcttcgacatgctccttgcgacatccagccgattccgaatgatgaatcttcaaggagaggaatttgtctgtcttaagagcattatactcctcaatagtggagtttacaccttcttgtcctctacactgaaatcacttgaggaaaaagatcacatacatagggtgttggataaaatcacggatacactcatacatctgatggcaaaagcaggattgaccctgcaacagcagcaccaacgactggcccaactgctgttgatccttagccatatcagacacatgtctagcaaaaggatggaacatttgtacagcatgaaatgtaagaacgtagtgccactgtccgatttgttgctggaaatgctggacgctcatcggctcggatccatctgggagctcaagaaagacgtgtacgtggtggaactggactggtaccccgacgcccctggcgaaatggtggtgctgacatgcgacacccctgaggaggatggcattacctggaccctcgatcagagctccgaggtgctgggcagcggcaaaaccctgaccatccaggtgaaggagtttggcgatgccggccagtacacatgtcacaagggcggcgaggtgctgagccactccctgctgctgctccacaagaaggaagatggcatctggagcaccgacattctgaaggatcagaaggagcccaagaacaagacattcctgaggtgtgaggccaagaactacagcggcaggtttacctgctggtggctgacaacaatcagcaccgacctcacattctccgtcaagtcctccaggggttcttccgaccctcaaggcgtgacatgcggcgctgccaccctgagcgctgagagagtcaggggcgacaacaaggagtacgagtacagcgtcgaatgtcaggaggacagcgcctgtcccgccgctgaagagagcctgcctatcgaggtgatggtggacgccgtgcacaaactgaagtatgagaattacacctccagcttcttcatcagggacatcatcaaacccgatccccccaagaacctgcagctgaagcctctgaagaacagcagacaggtcgaagtgtcctgggagtaccctgatacctggtccacaccccacagctacttcagcctgaccttttgcgtgcaggtgcagggcaagagcaaaagggagaagaaggacagggtgtttaccgacaagacctccgccacagtgatttgcagaaagaacgcctccatcagcgtgagggcccaggacaggtattacagcagctcctggagcgaatgggctagcgtgccctgtagcggaggaggaggcagcggaggaggaggttctggaggaggcggcagcagaaacctgcctgtcgctacccccgaccccggaatgttcccctgcctgcaccactcccagaacctcctgagggccgtgtccaacatgctgcagaaggctagacagaccctcgaattctacccctgtaccagcgaggagatcgaccatgaggacatcaccaaggataagaccagcaccgtggaggcttgcctgcctctggagctgaccaaaaacgagagctgcctgaacagcagggaaaccagcttcattaccaacggctcctgcctggcctccaggaagacatccttcatgatggccctgtgcctcagcagcatctacgaggacctgaagatgtatcaggtggagtttaagaccatgaatgccaagctgctgatggaccctaagaggcagatcttcctggaccagaatatgctggccgtgattgacgagctgatgcaggccctcaactttaacagcgagaccgtgccccagaaaagcagcctcgaagagcctgacttctacaaaaccaagattaagctgtgtatcctgctgcacgccttcaggatcagggccgtgaccatcgacagggtgatgagctacctgaacgcctcctaa

SEQ ID NO: 162 - protein, 787 aa, Artificial Sequence; identical to SEQ ID NO: 136
  Description of Artificial Sequence: Synthetic Construct

SEQ ID NO: 163 - DNA, 2364 bp, Artificial Sequence
  Description of Artificial Sequence: Synthetic Construct
atgtgccaccaacagctcgtgatcagctggttctccctggtgttcctggctagccccctggtggccatctgggagctcaagaaagacgtgtacgtggtggaactggactggtaccccgacgcccctggcgaaatggtggtgctgacatgcgacacccctgaggaggatggcattacctggaccctcgatcagagctccgaggtgctgggcagcggcaaaaccctgaccatccaggtgaaggagtttggcgatgccggccagtacacatgtcacaagggcggcgaggtgctgagccactccctgctgctgctccacaagaaggaagatggcatctggagcaccgacattctgaaggatcagaaggagcccaagaacaagacattcctgaggtgtgaggccaagaactacagcggcaggtttacctgctggtggctgacaacaatcagcaccgacctcacattctccgtcaagtcctccaggggttcttccgaccctcaaggcgtgacatgcggcgctgccaccctgagcgctgagagagtcaggggcgacaacaaggagtacgagtacagcgtcgaatgtcaggaggacagcgcctgtcccgccgctgaagagagcctgcctatcgaggtgatggtggacgccgtgcacaaactgaagtatgagaattacacctccagcttcttcatcagggacatcatcaaacccgatccccccaagaacctgcagctgaagcctctgaagaacagcagacaggtcgaagtgtcctgggagtaccctgatacctggtccacaccccacagctacttcagcctgaccttttgcgtgcaggtgcagggcaagagcaaaagggagaagaaggacagggtgtttaccgacaagacctccgccacagtgatttgcagaaagaacgcctccatcagcgtgagggcccaggacaggtattacagcagctcctggagcgaatgggctagcgtgccctgtagcggaggaggaggcagcggaggaggaggttctggaggaggcggcagcagaaacctgcctgtcgctacccccgaccccggaatgttcccctgcctgcaccactcccagaacctcctgagggccgtgtccaacatgctgcagaaggctagacagaccctcgaattctacccctgtaccagcgaggagatcgaccatgaggacatcaccaaggataagaccagcaccgtggaggcttgcctgcctctggagctgaccaaaaacgagagctgcctgaacagcagggaaaccagcttcattaccaacggctcctgcctggcctccaggaagacatccttcatgatggccctgtgcctcagcagcatctacgaggacctgaagatgtatcaggtggagtttaagaccatgaatgccaagctgctgatggaccctaagaggcagatcttcctggaccagaatatgctggccgtgattgacgagctgatgcaggccctcaactttaacagcgagaccgtgccccagaaaagcagcctcgaagagcctgacttctacaaaaccaagattaagctgtgtatcctgctgcacgccttcaggatcagggccgtgaccatcgacagggtgatgagctacctgaacgccagcggatcctcactggcgctcagccttactgccgaccaaatggtatcagctcttctggacgcagaacccccaattctttattccgagtacgaccccacacgcccgttcagtgaagcttccatgatgggcctccttacgaaccttgccgaccgggaactcgtgcacatgatcaattgggcgaagcgggtgccggggttcgtagatttgacacttcacgaccaagttcatctcttggaatgtgcttggatggagatattgatgatcggactcgtgtggaggtcaatggagcatcctggtaaacttcttttcgcacccaatctgctcttggatagagatcagggtaagtgcgtcgagggtggcgttgaaatcttcgacatgctccttgcgacatccagccgattccgaatgatgaatcttcaaggagaggaatttgtctgtcttaagagcattatactcctcaatagtggagtttacaccttcttgtcctctacactgaaatcacttgaggaaaaagatcacatacatagggtgttggataaaatcacggatacactcatacatctgatggcaaaagcaggattgaccctgcaacagcagcaccaacgactggcccaactgctgttgatccttagccatatcagacacatgtctaacaaaaggatggaacatttgtacagcatgaaatgtaagaacgtagtgccactgtccgatttgttgctggaaatgctggacgctcatcggctctga

SEQ ID NO: 164 - protein, 787 aa, Artificial Sequence
  Description of Artificial Sequence: Synthetic Construct
MCHQQLVISWFSLVFLASPLVAIWELKKDVYVVELDWYPDAPGEMVVLTCDTPEEDGITWTLDQSSEVLGSGKTLTIQVKEFGDAGQYTCHKGGEVLSHSLLLLHKKEDGIWSTDILKDQKEPKNKTFLRCEAKNYSGRFTCWWLTTISTDLTFSVKSSRGSSDPQGVTCGAATLSAERVRGDNKEYEYSVECQEDSACPAAEESLPIEVMVDAVHKLKYENYTSSFFIRDIIKPDPPKNLQLKPLKNSRQVEVSWEYPDTWSTPHSYFSLTFCVQVQGKSKREKKDRVFTDKTSATVICRKNASISVRAQDRYYSSSWSEWASVPCSGGGGSGGGGSGGGGSRNLPVATPDPGMFPCLHHSQNLLRAVSNMLQKARQTLEFYPCTSEEIDHEDITKDKTSTVEACLPLELTKNESCLNSRETSFITNGSCLASRKTSFMMALCLSSIYEDLKMYQVEFKTMNAKLLMDPKRQIFLDQNMLAVIDELMQALNFNSETVPQKSSLEEPDFYKTKIKLCILLHAFRIRAVTIDRVMSYLNASGSSLALSLTADQMVSALLDAEPPILYSEYDPTRPFSEASMMGLLTNLADRELVHMINWAKRVPGFVDLTLHDQVHLLECAWMEILMIGLVWRSMEHPGKLLFAPNLLLDRFQGKCVEGGVEIFDMLLATSSRFRMMNLQGEEFVCLKSIILLNSGVYTFLSSTLKSLEEKDHIHRVLDKITDTLIHLMAKAGLTLQQQHQRLAQLLLILSHIRHMSNKRMEHLYSMKCKNVVPLSDLLLEMLDAHRL

SEQ ID NO: 165 - DNA, 2364 bp, Artificial Sequence
  Description of Artificial Sequence: Synthetic Construct
atgtgccaccaacagctcgtgatcagctggttctccctggtgttcctggctagccccctggtggccatctgggagctcaagaaagacgtgtacgtggtggaactggactggtaccccgacgcccctggcgaaatggtggtgctgacatgcgacacccctgaggaggatggcattacctggaccctcgatcagagctccgaggtgctgggcagcggcaaaaccctgaccatccaggtgaaggagtttggcgatgccggccagtacacatgtcacaagggcggcgaggtgctgagccactccctgctgctgctccacaagaaggaagatggcatctggagcaccgacattctgaaggatcagaaggagcccaagaacaagacattcctgaggtgtgaggccaagaactacagcggcaggtttacctgctggtggctgacaacaatcagcaccgacctcacattctccgtcaagtcctccaggggttcttccgaccctcaaggcgtgacatgcggcgctgccaccctgagcgctgagagagtcaggggcgacaacaaggagtacgagtacagcgtcgaatgtcaggaggacagcgcctgtcccgccgctgaagagagcctgcctatcgaggtgatggtggacgccgtgcacaaactgaagtatgagaattacacctccagcttcttcatcagggacatcatcaaacccgatccccccaagaacctgcagctgaagcctctgaagaacagcagacaggtcgaagtgtcctgggagtaccctgatacctggtccacaccccacagctacttcagcctgaccttttgcgtgcaggtgcagggcaagagcaaaagggagaagaaggacagggtgtttaccgacaagacctccgccacagtgatttgcagaaagaacgcctccatcagcgtgagggcccaggacaggtattacagcagctcctggagcgaatgggctagcgtgccctgtagcggaggaggaggcagcggaggaggaggttctggaggaggcggcagcagaaacctgcctgtcgctacccccgaccccggaatgttcccctgcctgcaccactcccagaacctcctgagggccgtgtccaacatgctgcagaaggctagacagaccctcgaattctacccctgtaccagcgaggagatcgaccatgaggacatcaccaaggataagaccagcaccgtggaggcttgcctgcctctggagctgaccaaaaacgagagctgcctgaacagcagggaaaccagcttcattaccaacggctcctgcctggcctccaggaagacatccttcatgatggccctgtgcctcagcagcatctacgaggacctgaagatgtatcaggtggagtttaagaccatgaatgccaagctgctgatggaccctaagaggcagatcttcctggaccagaatatgctggccgtgattgacgagctgatgcaggccctcaactttaacagcgagaccgtgccccagaaaagcagcctcgaagagcctgacttctacaaaaccaagattaagctgtgtatcctgctgcacgccttcaggatcagggccgtgaccatcgacagggtgatgagctacctgaacgccagcggatcctcactggcgctcagccttactgccgaccaaatggtatcagctcttctggacgcagaacccccaattctttattccgagtacgaccccacacgcccgttcagtgaagcttccatgatgggcctccttacgaaccttgccgaccgggaactcgtgcacatgatcaattgggcgaagcgggtgccggggttcgtagatttgacacttcacgaccaagttcatctcttggaatgtgcttggatggagatattgatgatcggactcgtgtggaggtcaatggagcatcctggtaaacttcttttcgcacccaatctgctcttggatagattccagggtaagtgcgtcgagggtggcgttgaaatcttcgacatgctccttgcgacatccagccgattccgaatgatgaatcttcaaggagaggaatttgtctgtcttaagagcattatactcctcaatagtggagtttacaccttcttgtcctctacactgaaatcacttgaggaaaaagatcacatacatagggtgttggataaaatcacggatacactcatacatctgatggcaaaagcaggattgaccctgcaacagcagcaccaacgactggcccaactgctgttgatccttagccatatcagacacatgtctaacaaaaggatggaacatttgtacagcatgaaatgtaagaacgtagtgccactgtccgatttgttgctggaaatgctggacgctcatcggctctga

SEQ ID NO: 166 - protein, 787 aa, Artificial Sequence
  Description of Artificial Sequence: Synthetic Construct
MCHQQLVISWFSLVFLASPLVAIWELKKDVYVVELDWYPDAPGEMVVLTCDTPEEDGITWTLDQSSEVLGSGKTLTIQVKEFGDAGQYTCHKGGEVLSHSLLLLHKKEDGIWSTDILKDQKEPKNKTFLRCEAKNYSGRFTCWWLTTISTDLTFSVKSSRGSSDPQGVTCGAATLSAERVRGDNKEYEYSVECQEDSACPAAEESLPIEVMVDAVHKLKYENYTSSFFIRDIIKPDPPKNLQLKPLKNSRQVEVSWEYPDTWSTPHSYFSLTFCVQVQGKSKREKKDRVFTDKTSATVICRKNASISVRAQDRYYSSSWSEWASVPCSGGGGSGGGGSGGGGSRNLPVATPDPGMFPCLHHSQNLLRAVSNMLQKARQTLEFYPCTSEEIDHEDITKDKTSTVEACLPLELTKNESCLNSRETSFITNGSCLASRKTSFMMALCLSSIYEDLKMYQVEFKTMNAKLLMDPKRQIFLDQNMLAVIDELMQALNFNSETVPQKSSLEEPDFYKTKIKLCILLHAFRIRAVTIDRVMSYLNASGSSLALSLTADQMVSALLDAEPPILYSEYDPTRPFSEASMMGLLTNLADRELVHMINWAKRVPGFVDLTLHDQVHLLECAWMEILMIGLVWRSMEHPGKLLFAPNLLLDRLQGKCVEGGVEIFDMLLATSSRFRMMNLQGEEFVCLKSIILLNSGVYTFLSSTLKSLEEKDHIHRVLDKITDTLIHLMAKAGLTLQQQHQRLAQLLLILSHIRHMSNKRMEHLYSMKCKNVVPLSDLLLEMLDAHRL

SEQ ID NO: 167 - DNA, 2364 bp, Artificial Sequence
  Description of Artificial Sequence: Synthetic Construct
atgtgccaccaacagctcgtgatcagctggttctccctggtgttcctggctagccccctggtggccatctgggagctcaagaaagacgtgtacgtggtggaactggactggtaccccgacgcccctggcgaaatggtggtgctgacatgcgacacccctgaggaggatggcattacctggaccctcgatcagagctccgaggtgctgggcagcggcaaaaccctgaccatccaggtgaaggagtttggcgatgccggccagtacacatgtcacaagggcggcgaggtgctgagccactccctgctgctgctccacaagaaggaagatggcatctggagcaccgacattctgaaggatcagaaggagcccaagaacaagacattcctgaggtgtgaggccaagaactacagcggcaggtttacctgctggtggctgacaacaatcagcaccgacctcacattctccgtcaagtcctccaggggttcttccgaccctcaaggcgtgacatgcggcgctgccaccctgagcgctgagagagtcaggggcgacaacaaggagtacgagtacagcgtcgaatgtcaggaggacagcgcctgtcccgccgctgaagagagcctgcctatcgaggtgatggtggacgccgtgcacaaactgaagtatgagaattacacctccagcttcttcatcagggacatcatcaaacccgatccccccaagaacctgcagctgaagcctctgaagaacagcagacaggtcgaagtgtcctgggagtaccctgatacctggtccacaccccacagctacttcagcctgaccttttgcgtgcaggtgcagggcaagagcaaaagggagaagaaggacagggtgtttaccgacaagacctccgccacagtgatttgcagaaagaacgcctccatcagcgtgagggcccaggacaggtattacagcagctcctggagcgaatgggctagcgtgccctgtagcggaggaggaggcagcggaggaggaggttctggaggaggcggcagcagaaacctgcctgtcgctacccccgaccccggaatgttcccctgcctgcaccactcccagaacctcctgagggccgtgtccaacatgctgcagaaggctagacagaccctcgaattctacccctgtaccagcgaggagatcgaccatgaggacatcaccaaggataagaccagcaccgtggaggcttgcctgcctctggagctgaccaaaaacgagagctgcctgaacagcagggaaaccagcttcattaccaacggctcctgcctggcctccaggaagacatccttcatgatggccctgtgcctcagcagcatctacgaggacctgaagatgtatcaggtggagtttaagaccatgaatgccaagctgctgatggaccctaagaggcagatcttcctggaccagaatatgctggccgtgattgacgagctgatgcaggccctcaactttaacagcgagaccgtgccccagaaaagcagcctcgaagagcctgacttctacaaaaccaagattaagctgtgtatcctgctgcacgccttcaggatcagggccgtgaccatcgacagggtgatgagctacctgaacgccagcggatcctcactggcgctcagccttactgccgaccaaatggtatcagctcttctggacgcagaacccccaattctttattccgagtacgaccccacacgcccgttcagtgaagcttccatgatgggcctccttacgaaccttgccgaccgggaactcgtgcacatgatcaattgggcgaagcgggtgccggggttcgtagatttgacacttcacgaccaagttcatctcttggaatgtgcttggatggagatattgatgatcggactcgtgtggaggtcaatggagcatcctggtaaacttcttttcgcacccaatctgctcttggatagactgcagggtaagtgcgtcgagggtggcgttgaaatcttcgacatgctccttgcgacatccagccgattccgaatgatgaatcttcaaggagaggaatttgtctgtcttaagagcattatactcctcaatagtggagtttacaccttcttgtcctctacactgaaatcacttgaggaaaaagatcacatacatagggtgttggataaaatcacggatacactcatacatctgatggcaaaagcaggattgaccctgcaacagcagcaccaacgactggcccaactgctgttgatccttagccatatcagacacatgtctaacaaaaggatggaacatttgtacagcatgaaatgtaagaacgtagtgccactgtccgatttgttgctggaaatgctggacgctcatcggctctga

SEQ ID NO: 168 - protein, 787 aa, Artificial Sequence
  Description of Artificial Sequence: Synthetic Construct
MCHQQLVISWFSLVFLASPLVAIWELKKDVYVVELDWYPDAPGEMVVLTCDTPEEDGITWTLDQSSEVLGSGKTLTIQVKEFGDAGQYTCHKGGEVLSHSLLLLHKKEDGIWSTDILKDQKEPKNKTFLRCEAKNYSGRFTCWWLTTISTDLTFSVKSSRGSSDPQGVTCGAATLSAERVRGDNKEYEYSVECQEDSACPAAEESLPIEVMVDAVHKLKYENYTSSFFIRDIIKPDPPKNLQLKPLKNSRQVEVSWEYPDTWSTPHSYFSLTFCVQVQGKSKREKKDRVFTDKTSATVICRKNASISVRAQDRYYSSSWSEWASVPCSGGGGSGGGGSGGGGSRNLPVATPDPGMFPCLHHSQNLLRAVSNMLQKARQTLEFYPCTSEEIDHEDITKDKTSTVEACLPLELTKNESCLNSRETSFITNGSCLASRKTSFMMALCLSSIYEDLKMYQVEFKTMNAKLLMDPKRQIFLDQNMLAVIDELMQALNFNSETVPQKSSLEEPDFYKTKIKLCILLHAFRIRAVTIDRVMSYLNASGSSLALSLTADQMVSALLDAEPPILYSEYDPTRPFSEASMMGLLTNLADRELVHMINWAKRVPGFVDLTLHDQVHLLECAWMEILMIGLVWRSMEHPGKLLFAPNLLLDRYQGKCVEGGVEIFDMLLATSSRFRMMNLQGEEFVCLKSIILLNSGVYTFLSSTLKSLEEKDHIHRVLDKITDTLIHLMAKAGLTLQQQHQRLAQLLLILSHIRHMSNKRMEHLYSMKCKNVVPLSDLLLEMLDAHRL

SEQ ID NO: 169 - DNA, 2364 bp, Artificial Sequence
  Description of Artificial Sequence: Synthetic Construct
atgtgccaccaacagctcgtgatcagctggttctccctggtgttcctggctagccccctggtggccatctgggagctcaagaaagacgtgtacgtggtggaactggactggtaccccgacgcccctggcgaaatggtggtgctgacatgcgacacccctgaggaggatggcattacctggaccctcgatcagagctccgaggtgctgggcagcggcaaaaccctgaccatccaggtgaaggagtttggcgatgccggccagtacacatgtcacaagggcggcgaggtgctgagccactccctgctgctgctccacaagaaggaagatggcatctggagcaccgacattctgaaggatcagaaggagcccaagaacaagacattcctgaggtgtgaggccaagaactacagcggcaggtttacctgctggtggctgacaacaatcagcaccgacctcacattctccgtcaagtcctccaggggttcttccgaccctcaaggcgtgacatgcggcgctgccaccctgagcgctgagagagtcaggggcgacaacaaggagtacgagtacagcgtcgaatgtcaggaggacagcgcctgtcccgccgctgaagagagcctgcctatcgaggtgatggtggacgccgtgcacaaactgaagtatgagaattacacctccagcttcttcatcagggacatcatcaaacccgatccccccaagaacctgcagctgaagcctctgaagaacagcagacaggtcgaagtgtcctgggagtaccctgatacctggtccacaccccacagctacttcagcctgaccttttgcgtgcaggtgcagggcaagagcaaaagggagaagaaggacagggtgtttaccgacaagacctccgccacagtgatttgcagaaagaacgcctccatcagcgtgagggcccaggacaggtattacagcagctcctggagcgaatgggctagcgtgccctgtagcggaggaggaggcagcggaggaggaggttctggaggaggcggcagcagaaacctgcctgtcgctacccccgaccccggaatgttcccctgcctgcaccactcccagaacctcctgagggccgtgtccaacatgctgcagaaggctagacagaccctcgaattctacccctgtaccagcgaggagatcgaccatgaggacatcaccaaggataagaccagcaccgtggaggcttgcctgcctctggagctgaccaaaaacgagagctgcctgaacagcagggaaaccagcttcattaccaacggctcctgcctggcctccaggaagacatccttcatgatggccctgtgcctcagcagcatctacgaggacctgaagatgtatcaggtggagtttaagaccatgaatgccaagctgctgatggaccctaagaggcagatcttcctggaccagaatatgctggccgtgattgacgagctgatgcaggccctcaactttaacagcgagaccgtgccccagaaaagcagcctcgaagagcctgacttctacaaaaccaagattaagctgtgtatcctgctgcacgccttcaggatcagggccgtgaccatcgacagggtgatgagctacctgaacgccagcggatcctcactggcgctcagccttactgccgaccaaatggtatcagctcttctggacgcagaacccccaattctttattccgagtacgaccccacacgcccgttcagtgaagcttccatgatgggcctccttacgaaccttgccgaccgggaactcgtgcacatgatcaattgggcgaagcgggtgccggggttcgtagatttgacacttcacgaccaagttcatctcttggaatgtgcttggatggagatattgatgatcggactcgtgtggaggtcaatggagcatcctggtaaacttcttttcgcacccaatctgctcttggatagataccagggtaagtgcgtcgagggtggcgttgaaatcttcgacatgctccttgcgacatccagccgattccgaatgatgaatcttcaaggagaggaatttgtctgtcttaagagcattatactcctcaatagtggagtttacaccttcttgtcctctacactgaaatcacttgaggaaaaagatcacatacatagggtgttggataaaatcacggatacactcatacatctgatggcaaaagcaggattgaccctgcaacagcagcaccaacgactggcccaactgctgttgatccttagccatatcagacacatgtctaacaaaaggatggaacatttgtacagcatgaaatgtaagaacgtagtgccactgtccgatttgttgctggaaatgctggacgctcatcggctctga

SEQ ID NO: 170 - protein, 787 aa, Artificial Sequence
  Description of Artificial Sequence: Synthetic Construct
MCHQQLVISWFSLVFLASPLVAIWELKKDVYVVELDWYPDAPGEMVVLTCDTPEEDGITWTLDQSSEVLGSGKTLTIQVKEFGDAGQYTCHKGGEVLSHSLLLLHKKEDGIWSTDILKDQKEPKNKTFLRCEAKNYSGRFTCWWLTTISTDLTFSVKSSRGSSDPQGVTCGAATLSAERVRGDNKEYEYSVECQEDSACPAAEESLPIEVMVDAVHKLKYENYTSSFFIRDIIKPDPPKNLQLKPLKNSRQVEVSWEYPDTWSTPHSYFSLTFCVQVQGKSKREKKDRVFTDKTSATVICRKNASISVRAQDRYYSSSWSEWASVPCSGGGGSGGGGSGGGGSRNLPVATPDPGMFPCLHHSQNLLRAVSNMLQKARQTLEFYPCTSEEIDHEDITKDKTSTVEACLPLELTKNESCLNSRETSFITNGSCLASRKTSFMMALCLSSIYEDLKMYQVEFKTMNAKLLMDPKRQIFLDQNMLAVIDELMQALNFNSETVPQKSSLEEPDFYKTKIKLCILLHAFRIRAVTIDRVMSYLNASGSSLALSLTADQMVSALLDAEPPILYSEYDPTRPFSEASMMGLLTNLADRELVHMINWAKRVPGFVDLTLHDQVHLLECAWMEILMIGLVWRSMEHPGKLLFAPNLLLDRHQGKCVEGGVEIFDMLLATSSRFRMMNLQGEEFVCLKSIILLNSGVYTFLSSTLKSLEEKDHIHRVLDKITDTLIHLMAKAGLTLQQQHQRLAQLLLILSHIRHMSNKRMEHLYSMKCKNVVPLSDLLLEMLDAHRL

SEQ ID NO: 171 - DNA, 2364 bp, Artificial Sequence
  Description of Artificial Sequence: Synthetic Construct
atgtgccaccaacagctcgtgatcagctggttctccctggtgttcctggctagccccctggtggccatctgggagctcaagaaagacgtgtacgtggtggaactggactggtaccccgacgcccctggcgaaatggtggtgctgacatgcgacacccctgaggaggatggcattacctggaccctcgatcagagctccgaggtgctgggcagcggcaaaaccctgaccatccaggtgaaggagtttggcgatgccggccagtacacatgtcacaagggcggcgaggtgctgagccactccctgctgctgctccacaagaaggaagatggcatctggagcaccgacattctgaaggatcagaaggagcccaagaacaagacattcctgaggtgtgaggccaagaactacagcggcaggtttacctgctggtggctgacaacaatcagcaccgacctcacattctccgtcaagtcctccaggggttcttccgaccctcaaggcgtgacatgcggcgctgccaccctgagcgctgagagagtcaggggcgacaacaaggagtacgagtacagcgtcgaatgtcaggaggacagcgcctgtcccgccgctgaagagagcctgcctatcgaggtgatggtggacgccgtgcacaaactgaagtatgagaattacacctccagcttcttcatcagggacatcatcaaacccgatccccccaagaacctgcagctgaagcctctgaagaacagcagacaggtcgaagtgtcctgggagtaccctgatacctggtccacaccccacagctacttcagcctgaccttttgcgtgcaggtgcagggcaagagcaaaagggagaagaaggacagggtgtttaccgacaagacctccgccacagtgatttgcagaaagaacgcctccatcagcgtgagggcccaggacaggtattacagcagctcctggagcgaatgggctagcgtgccctgtagcggaggaggaggcagcggaggaggaggttctggaggaggcggcagcagaaacctgcctgtcgctacccccgaccccggaatgttcccctgcctgcaccactcccagaacctcctgagggccgtgtccaacatgctgcagaaggctagacagaccctcgaattctacccctgtaccagcgaggagatcgaccatgaggacatcaccaaggataagaccagcaccgtggaggcttgcctgcctctggagctgaccaaaaacgagagctgcctgaacagcagggaaaccagcttcattaccaacggctcctgcctggcctccaggaagacatccttcatgatggccctgtgcctcagcagcatctacgaggacctgaagatgtatcaggtggagtttaagaccatgaatgccaagctgctgatggaccctaagaggcagatcttcctggaccagaatatgctggccgtgattgacgagctgatgcaggccctcaactttaacagcgagaccgtgccccagaaaagcagcctcgaagagcctgacttctacaaaaccaagattaagctgtgtatcctgctgcacgccttcaggatcagggccgtgaccatcgacagggtgatgagctacctgaacgccagcggatcctcactggcgctcagccttactgccgaccaaatggtatcagctcttctggacgcagaacccccaattctttattccgagtacgaccccacacgcccgttcagtgaagcttccatgatgggcctccttacgaaccttgccgaccgggaactcgtgcacatgatcaattgggcgaagcgggtgccggggttcgtagatttgacacttcacgaccaagttcatctcttggaatgtgcttggatggagatattgatgatcggactcgtgtggaggtcaatggagcatcctggtaaacttcttttcgcacccaatctgctcttggatagacaccagggtaagtgcgtcgagggtggcgttgaaatcttcgacatgctccttgcgacatccagccgattccgaatgatgaatcttcaaggagaggaatttgtctgtcttaagagcattatactcctcaatagtggagtttacaccttcttgtcctctacactgaaatcacttgaggaaaaagatcacatacatagggtgttggataaaatcacggatacactcatacatctgatggcaaaagcaggattgaccctgcaacagcagcaccaacgactggcccaactgctgttgatccttagccatatcagacacatgtctaacaaaaggatggaacatttgtacagcatgaaatgtaagaacgtagtgccactgtccgatttgttgctggaaatgctggacgctcatcggctctga

SEQ ID NO: 172 - protein, 787 aa, Artificial Sequence
  Description of Artificial Sequence: Synthetic Construct
MCHQQLVISWFSLVFLASPLVAIWELKKDVYVVELDWYPDAPGEMVVLTCDTPEEDGITWTLDQSSEVLGSGKTLTIQVKEFGDAGQYTCHKGGEVLSHSLLLLHKKEDGIWSTDILKDQKEPKNKTFLRCEAKNYSGRFTCWWLTTISTDLTFSVKSSRGSSDPQGVTCGAATLSAERVRGDNKEYEYSVECQEDSACPAAEESLPIEVMVDAVHKLKYENYTSSFFIRDIIKPDPPKNLQLKPLKNSRQVEVSWEYPDTWSTPHSYFSLTFCVQVQGKSKREKKDRVFTDKTSATVICRKNASISVRAQDRYYSSSWSEWASVPCSGGGGSGGGGSGGGGSRNLPVATPDPGMFPCLHHSQNLLRAVSNMLQKARQTLEFYPCTSEEIDHEDITKDKTSTVEACLPLELTKNESCLNSRETSFITNGSCLASRKTSFMMALCLSSIYEDLKMYQVEFKTMNAKLLMDPKRQIFLDQNMLAVIDELMQALNFNSETVPQKSSLEEPDFYKTKIKLCILLHAFRIRAVTIDRVMSYLNASGSSLALSLTADQMVSALLDAEPPILYSEYDPTRPFSEASMMGLLTNLADRELVHMINWAKRVPGFVDLTLHDQVHLLECAWMEILMIGLVWRSMEHPGKLLFAPNLLLDRQQGKCVEGGVEIFDMLLATSSRFRMMNLQGEEFVCLKSIILLNSGVYTFLSSTLKSLEEKDHIHRVLDKITDTLIHLMAKAGLTLQQQHQRLAQLLLILSHIRHMSNKRMEHLYSMKCKNVVPLSDLLLEMLDAHRL

SEQ ID NO: 173 - DNA, 2364 bp, Artificial Sequence
  Description of Artificial Sequence: Synthetic Construct
atgtgccaccaacagctcgtgatcagctggttctccctggtgttcctggctagccccctggtggccatctgggagctcaagaaagacgtgtacgtggtggaactggactggtaccccgacgcccctggcgaaatggtggtgctgacatgcgacacccctgaggaggatggcattacctggaccctcgatcagagctccgaggtgctgggcagcggcaaaaccctgaccatccaggtgaaggagtttggcgatgccggccagtacacatgtcacaagggcggcgaggtgctgagccactccctgctgctgctccacaagaaggaagatggcatctggagcaccgacattctgaaggatcagaaggagcccaagaacaagacattcctgaggtgtgaggccaagaactacagcggcaggtttacctgctggtggctgacaacaatcagcaccgacctcacattctccgtcaagtcctccaggggttcttccgaccctcaaggcgtgacatgcggcgctgccaccctgagcgctgagagagtcaggggcgacaacaaggagtacgagtacagcgtcgaatgtcaggaggacagcgcctgtcccgccgctgaagagagcctgcctatcgaggtgatggtggacgccgtgcacaaactgaagtatgagaattacacctccagcttcttcatcagggacatcatcaaacccgatccccccaagaacctgcagctgaagcctctgaagaacagcagacaggtcgaagtgtcctgggagtaccctgatacctggtccacaccccacagctacttcagcctgaccttttgcgtgcaggtgcagggcaagagcaaaagggagaagaaggacagggtgtttaccgacaagacctccgccacagtgatttgcagaaagaacgcctccatcagcgtgagggcccaggacaggtattacagcagctcctggagcgaatgggctagcgtgccctgtagcggaggaggaggcagcggaggaggaggttctggaggaggcggcagcagaaacctgcctgtcgctacccccgaccccggaatgttcccctgcctgcaccactcccagaacctcctgagggccgtgtccaacatgctgcagaaggctagacagaccctcgaattctacccctgtaccagcgaggagatcgaccatgaggacatcaccaaggataagaccagcaccgtggaggcttgcctgcctctggagctgaccaaaaacgagagctgcctgaacagcagggaaaccagcttcattaccaacggctcctgcctggcctccaggaagacatccttcatgatggccctgtgcctcagcagcatctacgaggacctgaagatgtatcaggtggagtttaagaccatgaatgccaagctgctgatggaccctaagaggcagatcttcctggaccagaatatgctggccgtgattgacgagctgatgcaggccctcaactttaacagcgagaccgtgccccagaaaagcagcctcgaagagcctgacttctacaaaaccaagattaagctgtgtatcctgctgcacgccttcaggatcagggccgtgaccatcgacagggtgatgagctacctgaacgccagcggatcctcactggcgctcagccttactgccgaccaaatggtatcagctcttctggacgcagaacccccaattctttattccgagtacgaccccacacgcccgttcagtgaagcttccatgatgggcctccttacgaaccttgccgaccgggaactcgtgcacatgatcaattgggcgaagcgggtgccggggttcgtagatttgacacttcacgaccaagttcatctcttggaatgtgcttggatggagatattgatgatcggactcgtgtggaggtcaatggagcatcctggtaaacttcttttcgcacccaatctgctcttggatagacagcagggtaagtgcgtcgagggtggcgttgaaatcttcgacatgctccttgcgacatccagccgattccgaatgatgaatcttcaaggagaggaatttgtctgtcttaagagcattatactcctcaatagtggagtttacaccttcttgtcctctacactgaaatcacttgaggaaaaagatcacatacatagggtgttggataaaatcacggatacactcatacatctgatggcaaaagcaggattgaccctgcaacagcagcaccaacgactggcccaactgctgttgatccttagccatatcagacacatgtctaacaaaaggatggaacatttgtacagcatgaaatgtaagaacgtagtgccactgtccgatttgttgctggaaatgctggacgctcatcggctctga

SEQ ID NO: 174 - protein, 787 aa, Artificial Sequence
  Description of Artificial Sequence: Synthetic Construct
MCHQQLVISWFSLVFLASPLVAIWELKKDVYVVELDWYPDAPGEMVVLTCDTPEEDGITWTLDQSSEVLGSGKTLTIQVKEFGDAGQYTCHKGGEVLSHSLLLLHKKEDGIWSTDILKDQKEPKNKTFLRCEAKNYSGRFTCWWLTTISTDLTFSVKSSRGSSDPQGVTCGAATLSAERVRGDNKEYEYSVECQEDSACPAAEESLPIEVMVDAVHKLKYENYTSSFFIRDIIKPDPPKNLQLKPLKNSRQVEVSWEYPDTWSTPHSYFSLTFCVQVQGKSKREKKDRVFTDKTSATVICRKNASISVRAQDRYYSSSWSEWASVPCSGGGGSGGGGSGGGGSRNLPVATPDPGMFPCLHHSQNLLRAVSNMLQKARQTLEFYPCTSEEIDHEDITKDKTSTVEACLPLELTKNESCLNSRETSFITNGSCLASRKTSFMMALCLSSIYEDLKMYQVEFKTMNAKLLMDPKRQIFLDQNMLAVIDELMQALNFNSETVPQKSSLEEPDFYKTKIKLCILLHAFRIRAVTIDRVMSYLNASGSSLALSLTADQMVSALLDAEPPILYSEYDPTRPFSEASMMGLLTNLADRELVHMINWAKRVPGFVDLTLHDQVHLLECAWMEILMIGLVWRSMEHPGKLLFAPNLLLDRIQGKCVEGGVEIFDMLLATSSRFRMMNLQGEEFVCLKSIILLNSGVYTFLSSTLKSLEEKDHIHRVLDKITDTLIHLMAKAGLTLQQQHQRLAQLLLILSHIRHMSNKRMEHLYSMKCKNVVPLSDLLLEMLDAHRL

SEQ ID NO: 175 - DNA, 2364 bp, Artificial Sequence
  Description of Artificial Sequence: Synthetic Construct
atgtgccaccaacagctcgtgatcagctggttctccctggtgttcctggctagccccctggtggccatctgggagctcaagaaagacgtgtacgtggtggaactggactggtaccccgacgcccctggcgaaatggtggtgctgacatgcgacacccctgaggaggatggcattacctggaccctcgatcagagctccgaggtgctgggcagcggcaaaaccctgaccatccaggtgaaggagtttggcgatgccggccagtacacatgtcacaagggcggcgaggtgctgagccactccctgctgctgctccacaagaaggaagatggcatctggagcaccgacattctgaaggatcagaaggagcccaagaacaagacattcctgaggtgtgaggccaagaactacagcggcaggtttacctgctggtggctgacaacaatcagcaccgacctcacattctccgtcaagtcctccaggggttcttccgaccctcaaggcgtgacatgcggcgctgccaccctgagcgctgagagagtcaggggcgacaacaaggagtacgagtacagcgtcgaatgtcaggaggacagcgcctgtcccgccgctgaagagagcctgcctatcgaggtgatggtggacgccgtgcacaaactgaagtatgagaattacacctccagcttcttcatcagggacatcatcaaacccgatccccccaagaacctgcagctgaagcctctgaagaacagcagacaggtcgaagtgtcctgggagtaccctgatacctggtccacaccccacagctacttcagcctgaccttttgcgtgcaggtgcagggcaagagcaaaagggagaagaaggacagggtgtttaccgacaagacctccgccacagtgatttgcagaaagaacgcctccatcagcgtgagggcccaggacaggtattacagcagctcctggagcgaatgggctagcgtgccctgtagcggaggaggaggcagcggaggaggaggttctggaggaggcggcagcagaaacctgcctgtcgctacccccgaccccggaatgttcccctgcctgcaccactcccagaacctcctgagggccgtgtccaacatgctgcagaaggctagacagaccctcgaattctacccctgtaccagcgaggagatcgaccatgaggacatcaccaaggataagaccagcaccgtggaggcttgcctgcctctggagctgaccaaaaacgagagctgcctgaacagcagggaaaccagcttcattaccaacggctcctgcctggcctccaggaagacatccttcatgatggccctgtgcctcagcagcatctacgaggacctgaagatgtatcaggtggagtttaagaccatgaatgccaagctgctgatggaccctaagaggcagatcttcctggaccagaatatgctggccgtgattgacgagctgatgcaggccctcaactttaacagcgagaccgtgccccagaaaagcagcctcgaagagcctgacttctacaaaaccaagattaagctgtgtatcctgctgcacgccttcaggatcagggccgtgaccatcgacagggtgatgagctacctgaacgccagcggatcctcactggcgctcagccttactgccgaccaaatggtatcagctcttctggacgcagaacccccaattctttattccgagtacgaccccacacgcccgttcagtgaagcttccatgatgggcctccttacgaaccttgccgaccgggaactcgtgcacatgatcaattgggcgaagcgggtgccggggttcgtagatttgacacttcacgaccaagttcatctcttggaatgtgcttggatggagatattgatgatcggactcgtgtggaggtcaatggagcatcctggtaaacttcttttcgcacccaatctgctcttggatagaatccagggtaagtgcgtcgagggtggcgttgaaatcttcgacatgctccttgcgacatccagccgattccgaatgatgaatcttcaaggagaggaatttgtctgtcttaagagcattatactcctcaatagtggagtttacaccttcttgtcctctacactgaaatcacttgaggaaaaagatcacatacatagggtgttggataaaatcacggatacactcatacatctgatggcaaaagcaggattgaccctgcaacagcagcaccaacgactggcccaactgctgttgatccttagccatatcagacacatgtctaacaaaaggatggaacatttgtacagcatgaaatgtaagaacgtagtgccactgtccgatttgttgctggaaatgctggacgctcatcggctctga

SEQ ID NO: 176 - protein, 787 aa, Artificial Sequence
  Description of Artificial Sequence: Synthetic Construct
MCHQQLVISWFSLVFLASPLVAIWELKKDVYVVELDWYPDAPGEMVVLTCDTPEEDGITWTLDQSSEVLGSGKTLTIQVKEFGDAGQYTCHKGGEVLSHSLLLLHKKEDGIWSTDILKDQKEPKNKTFLRCEAKNYSGRFTCWWLTTISTDLTFSVKSSRGSSDPQGVTCGAATLSAERVRGDNKEYEYSVECQEDSACPAAEESLPIEVMVDAVHKLKYENYTSSFFIRDIIKPDPPKNLQLKPLKNSRQVEVSWEYPDTWSTPHSYFSLTFCVQVQGKSKREKKDRVFTDKTSATVICRKNASISVRAQDRYYSSSWSEWASVPCSGGGGSGGGGSGGGGSRNLPVATPDPGMFPCLHHSQNLLRAVSNMLQKARQTLEFYPCTSEEIDHEDITKDKTSTVEACLPLELTKNESCLNSRETSFITNGSCLASRKTSFMMALCLSSIYEDLKMYQVEFKTMNAKLLMDPKRQIFLDQNMLAVIDELMQALNFNSETVPQKSSLEEPDFYKTKIKLCILLHAFRIRAVTIDRVMSYLNASGSSLALSLTADQMVSALLDAEPPILYSEYDPTRPFSEASMMGLLTNLADRELVHMINWAKRVPGFVDLTLHDQVHLLECAWMEILMIGLVWRSMEHPGKLLFAPNLLLDRMQGKCVEGGVEIFDMLLATSSRFRMMNLQGEEFVCLKSIILLNSGVYTFLSSTLKSLEEKDHIHRVLDKITDTLIHLMAKAGLTLQQQHQRLAQLLLILSHIRHMSNKRMEHLYSMKCKNVVPLSDLLLEMLDAHRL

SEQ ID NO: 177 - DNA, 2364 bp, Artificial Sequence
  Description of Artificial Sequence: Synthetic Construct
atgtgccaccaacagctcgtgatcagctggttctccctggtgttcctggctagccccctggtggccatctgggagctcaagaaagacgtgtacgtggtggaactggactggtaccccgacgcccctggcgaaatggtggtgctgacatgcgacacccctgaggaggatggcattacctggaccctcgatcagagctccgaggtgctgggcagcggcaaaaccctgaccatccaggtgaaggagtttggcgatgccggccagtacacatgtcacaagggcggcgaggtgctgagccactccctgctgctgctccacaagaaggaagatggcatctggagcaccgacattctgaaggatcagaaggagcccaagaacaagacattcctgaggtgtgaggccaagaactacagcggcaggtttacctgctggtggctgacaacaatcagcaccgacctcacattctccgtcaagtcctccaggggttcttccgaccctcaaggcgtgacatgcggcgctgccaccctgagcgctgagagagtcaggggcgacaacaaggagtacgagtacagcgtcgaatgtcaggaggacagcgcctgtcccgccgctgaagagagcctgcctatcgaggtgatggtggacgccgtgcacaaactgaagtatgagaattacacctccagcttcttcatcagggacatcatcaaacccgatccccccaagaacctgcagctgaagcctctgaagaacagcagacaggtcgaagtgtcctgggagtaccctgatacctggtccacaccccacagctacttcagcctgaccttttgcgtgcaggtgcagggcaagagcaaaagggagaagaaggacagggtgtttaccgacaagacctccgccacagtgatttgcagaaagaacgcctccatcagcgtgagggcccaggacaggtattacagcagctcctggagcgaatgggctagcgtgccctgtagcggaggaggaggcagcggaggaggaggttctggaggaggcggcagcagaaacctgcctgtcgctacccccgaccccggaatgttcccctgcctgcaccactcccagaacctcctgagggccgtgtccaacatgctgcagaaggctagacagaccctcgaattctacccctgtaccagcgaggagatcgaccatgaggacatcaccaaggataagaccagcaccgtggaggcttgcctgcctctggagctgaccaaaaacgagagctgcctgaacagcagggaaaccagcttcattaccaacggctcctgcctggcctccaggaagacatccttcatgatggccctgtgcctcagcagcatctacgaggacctgaagatgtatcaggtggagtttaagaccatgaatgccaagctgctgatggaccctaagaggcagatcttcctggaccagaatatgctggccgtgattgacgagctgatgcaggccctcaactttaacagcgagaccgtgccccagaaaagcagcctcgaagagcctgacttctacaaaaccaagattaagctgtgtatcctgctgcacgccttcaggatcagggccgtgaccatcgacagggtgatgagctacctgaacgccagcggatcctcactggcgctcagccttactgccgaccaaatggtatcagctcttctggacgcagaacccccaattctttattccgagtacgaccccacacgcccgttcagtgaagcttccatgatgggcctccttacgaaccttgccgaccgggaactcgtgcacatgatcaattgggcgaagcgggtgccggggttcgtagatttgacacttcacgaccaagttcatctcttggaatgtgcttggatggagatattgatgatcggactcgtgtggaggtcaatggagcatcctggtaaacttcttttcgcacccaatctgctcttggatagaatgcagggtaagtgcgtcgagggtggcgttgaaatcttcgacatgctccttgcgacatccagccgattccgaatgatgaatcttcaaggagaggaatttgtctgtcttaagagcattatactcctcaatagtggagtttacaccttcttgtcctctacactgaaatcacttgaggaaaaagatcacatacatagggtgttggataaaatcacggatacactcatacatctgatggcaaaagcaggattgaccctgcaacagcagcaccaacgactggcccaactgctgttgatccttagccatatcagacacatgtctaacaaaaggatggaacatttgtacagcatgaaatgtaagaacgtagtgccactgtccgatttgttgctggaaatgctggacgctcatcggctctga

SEQ ID NO: 178 - protein, 787 aa, Artificial Sequence; identical to SEQ ID NO: 154
  Description of Artificial Sequence: Synthetic Construct

SEQ ID NO: 179 - DNA, 2364 bp, Artificial Sequence
  Description of Artificial Sequence: Synthetic Construct
atgtgccaccaacagctcgtgatcagctggttctccctggtgttcctggctagccccctggtggccatctgggagctcaagaaagacgtgtacgtggtggaactggactggtaccccgacgcccctggcgaaatggtggtgctgacatgcgacacccctgaggaggatggcattacctggaccctcgatcagagctccgaggtgctgggcagcggcaaaaccctgaccatccaggtgaaggagtttggcgatgccggccagtacacatgtcacaagggcggcgaggtgctgagccactccctgctgctgctccacaagaaggaagatggcatctggagcaccgacattctgaaggatcagaaggagcccaagaacaagacattcctgaggtgtgaggccaagaactacagcggcaggtttacctgctggtggctgacaacaatcagcaccgacctcacattctccgtcaagtcctccaggggttcttccgaccctcaaggcgtgacatgcggcgctgccaccctgagcgctgagagagtcaggggcgacaacaaggagtacgagtacagcgtcgaatgtcaggaggacagcgcctgtcccgccgctgaagagagcctgcctatcgaggtgatggtggacgccgtgcacaaactgaagtatgagaattacacctccagcttcttcatcagggacatcatcaaacccgatccccccaagaacctgcagctgaagcctctgaagaacagcagacaggtcgaagtgtcctgggagtaccctgatacctggtccacaccccacagctacttcagcctgaccttttgcgtgcaggtgcagggcaagagcaaaagggagaagaaggacagggtgtttaccgacaagacctccgccacagtgatttgcagaaagaacgcctccatcagcgtgagggcccaggacaggtattacagcagctcctggagcgaatgggctagcgtgccctgtagcggaggaggaggcagcggaggaggaggttctggaggaggcggcagcagaaacctgcctgtcgctacccccgaccccggaatgttcccctgcctgcaccactcccagaacctcctgagggccgtgtccaacatgctgcagaaggctagacagaccctcgaattctacccctgtaccagcgaggagatcgaccatgaggacatcaccaaggataagaccagcaccgtggaggcttgcctgcctctggagctgaccaaaaacgagagctgcctgaacagcagggaaaccagcttcattaccaacggctcctgcctggcctccaggaagacatccttcatgatggccctgtgcctcagcagcatctacgaggacctgaagatgtatcaggtggagtttaagaccatgaatgccaagctgctgatggaccctaagaggcagatcttcctggaccagaatatgctggccgtgattgacgagctgatgcaggccctcaactttaacagcgagaccgtgccccagaaaagcagcctcgaagagcctgacttctacaaaaccaagattaagctgtgtatcctgctgcacgccttcaggatcagggccgtgaccatcgacagggtgatgagctacctgaacgccagcggatcctcactggcgctcagccttactgccgaccaaatggtatcagctcttctggacgcagaacccccaattctttattccgagtacgaccccacacgcccgttcagtgaagcttccatgatgggcctccttacgaaccttgccgaccgggaactcgtgcacatgatcaattgggcgaagcgggtgccggggttcgtagatttgacacttcacgaccaagttcatctcttggaatgtgcttggatggagatattgatgatcggactcgtgtggaggtcaatggagcatcctggtaaacttcttttcgcacccaatctgctcttggatagaaatcagggtaagtgcgtcgagggtggcgttgaaatcttcgacatgctccttgcgacatccagccgattccgaatgatgaatcttcaaggagaggaatttgtctgtcttaagagcattatactcctcaatagtggagtttacaccttcttgtcctctacactgaaatcacttgaggaaaaagatcacatacatagggtgttggataaaatcacggatacactcatacatctgatggcaaaagcaggattgaccctgcaacagcagcaccagcgactggcccaactgctgttgatccttagccatatcagacacatgtctaacaaaaggatggaacatttgtacagcatgaaatgtaagaacgtagtgccactgtccgatttgttgctggaaatgctggacgctcatcggctctga

SEQ ID NO: 180 - protein, 787 aa, Artificial Sequence
  Description of Artificial Sequence: Synthetic Construct
MCHQQLVISWFSLVFLASPLVAIWELKKDVYVVELDWYPDAPGEMVVLTCDTPEEDGITWTLDQSSEVLGSGKTLTIQVKEFGDAGQYTCHKGGEVLSHSLLLLHKKEDGIWSTDILKDQKEPKNKTFLRCEAKNYSGRFTCWWLTTISTDLTFSVKSSRGSSDPQGVTCGAATLSAERVRGDNKEYEYSVECQEDSACPAAEESLPIEVMVDAVHKLKYENYTSSFFIRDIIKPDPPKNLQLKPLKNSRQVEVSWEYPDTWSTPHSYFSLTFCVQVQGKSKREKKDRVFTDKTSATVICRKNASISVRAQDRYYSSSWSEWASVPCSGGGGSGGGGSGGGGSRNLPVATPDPGMFPCLHHSQNLLRAVSNMLQKARQTLEFYPCTSEEIDHEDITKDKTSTVEACLPLELTKNESCLNSRETSFITNGSCLASRKTSFMMALCLSSIYEDLKMYQVEFKTMNAKLLMDPKRQIFLDQNMLAVIDELMQALNFNSETVPQKSSLEEPDFYKTKIKLCILLHAFRIRAVTIDRVMSYLNASGSSLALSLTADQMVSALLDAEPPILYSEYDPTRPFSEASMMGLLTNLADRELVHMINWAKRVPGFVDLTLHDQVHLLECAWMEILMIGLVWRSMEHPGKLLFAPNLLLDRKQGKCVEGGVEIFDMLLATSSRFRMMNLQGEEFVCLKSIILLNSGVYTFLSSTLKSLEEKDHIHRVLDKITDTLIHLMAKAGLTLQQQHQRLAQLLLILSHIRHMSNKRMEHLYSMKCKNVVPLSDLLLEMLDAHRL

SEQ ID NO: 181 - DNA, 2364 bp, Artificial Sequence
  Description of Artificial Sequence: Synthetic Construct
atgtgccaccaacagctcgtgatcagctggttctccctggtgttcctggctagccccctggtggccatctgggagctcaagaaagacgtgtacgtggtggaactggactggtaccccgacgcccctggcgaaatggtggtgctgacatgcgacacccctgaggaggatggcattacctggaccctcgatcagagctccgaggtgctgggcagcggcaaaaccctgaccatccaggtgaaggagtttggcgatgccggccagtacacatgtcacaagggcggcgaggtgctgagccactccctgctgctgctccacaagaaggaagatggcatctggagcaccgacattctgaaggatcagaaggagcccaagaacaagacattcctgaggtgtgaggccaagaactacagcggcaggtttacctgctggtggctgacaacaatcagcaccgacctcacattctccgtcaagtcctccaggggttcttccgaccctcaaggcgtgacatgcggcgctgccaccctgagcgctgagagagtcaggggcgacaacaaggagtacgagtacagcgtcgaatgtcaggaggacagcgcctgtcccgccgctgaagagagcctgcctatcgaggtgatggtggacgccgtgcacaaactgaagtatgagaattacacctccagcttcttcatcagggacatcatcaaacccgatccccccaagaacctgcagctgaagcctctgaagaacagcagacaggtcgaagtgtcctgggagtaccctgatacctggtccacaccccacagctacttcagcctgaccttttgcgtgcaggtgcagggcaagagcaaaagggagaagaaggacagggtgtttaccgacaagacctccgccacagtgatttgcagaaagaacgcctccatcagcgtgagggcccaggacaggtattacagcagctcctggagcgaatgggctagcgtgccctgtagcggaggaggaggcagcggaggaggaggttctggaggaggcggcagcagaaacctgcctgtcgctacccccgaccccggaatgttcccctgcctgcaccactcccagaacctcctgagggccgtgtccaacatgctgcagaaggctagacagaccctcgaattctacccctgtaccagcgaggagatcgaccatgaggacatcaccaaggataagaccagcaccgtggaggcttgcctgcctctggagctgaccaaaaacgagagctgcctgaacagcagggaaaccagcttcattaccaacggctcctgcctggcctccaggaagacatccttcatgatggccctgtgcctcagcagcatctacgaggacctgaagatgtatcaggtggagtttaagaccatgaatgccaagctgctgatggaccctaagaggcagatcttcctggaccagaatatgctggccgtgattgacgagctgatgcaggccctcaactttaacagcgagaccgtgccccagaaaagcagcctcgaagagcctgacttctacaaaaccaagattaagctgtgtatcctgctgcacgccttcaggatcagggccgtgaccatcgacagggtgatgagctacctgaacgccagcggatcctcactggcgctcagccttactgccgaccaaatggtatcagctcttctggacgcagaacccccaattctttattccgagtacgaccccacacgcccgttcagtgaagcttccatgatgggcctccttacgaaccttgccgaccgggaactcgtgcacatgatcaattgggcgaagcgggtgccggggttcgtagatttgacacttcacgaccaagttcatctcttggaatgtgcttggatggagatattgatgatcggactcgtgtggaggtcaatggagcatcctggtaaacttcttttcgcacccaatctgctcttggatagaaagcagggtaagtgcgtcgagggtggcgttgaaatcttcgacatgctccttgcgacatccagccgattccgaatgatgaatcttcaaggagaggaatttgtctgtcttaagagcattatactcctcaatagtggagtttacaccttcttgtcctctacactgaaatcacttgaggaaaaagatcacatacatagggtgttggataaaatcacggatacactcatacatctgatggcaaaagcaggattgaccctgcaacagcagcaccaacgactggcccaactgctgttgatccttagccatatcagacacatgtctaacaaaaggatggaacatttgtacagcatgaaatgtaagaacgtagtgccactgtccgatttgttgctggaaatgctggacgctcatcggctctga

SEQ ID NO: 182 - protein, 787 aa, Artificial Sequence
  Description of Artificial Sequence: Synthetic Construct
MCHQQLVISWFSLVFLASPLVAIWELKKDVYVVELDWYPDAPGEMVVLTCDTPEEDGITWTLDQSSEVLGSGKTLTIQVKEFGDAGQYTCHKGGEVLSHSLLLLHKKEDGIWSTDILKDQKEPKNKTFLRCEAKNYSGRFTCWWLTTISTDLTFSVKSSRGSSDPQGVTCGAATLSAERVRGDNKEYEYSVECQEDSACPAAEESLPIEVMVDAVHKLKYENYTSSFFIRDIIKPDPPKNLQLKPLKNSRQVEVSWEYPDTWSTPHSYFSLTFCVQVQGKSKREKKDRVFTDKTSATVICRKNASISVRAQDRYYSSSWSEWASVPCSGGGGSGGGGSGGGGSRNLPVATPDPGMFPCLHHSQNLLRAVSNMLQKARQTLEFYPCTSEEIDHEDITKDKTSTVEACLPLELTKNESCLNSRETSFITNGSCLASRKTSFMMALCLSSIYEDLKMYQVEFKTMNAKLLMDPKRQIFLDQNMLAVIDELMQALNFNSETVPQKSSLEEPDFYKTKIKLCILLHAFRIRAVTIDRVMSYLNASGSSLALSLTADQMVSALLDAEPPILYSEYDPTRPFSEASMMGLLTNLADRELVHMINWAKRVPGFVDLTLHDQVHLLECAWMEILMIGLVWRSMEHPGKLLFAPNLLLDRVQGKCVEGGVEIFDMLLATSSRFRMMNLQGEEFVCLKSIILLNSGVYTFLSSTLKSLEEKDHIHRVLDKITDTLIHLMAKAGLTLQQQHQRLAQLLLILSHIRHMSNKRMEHLYSMKCKNVVPLSDLLLEMLDAHRL

SEQ ID NO: 183 - DNA, 2364 bp, Artificial Sequence
  Description of Artificial Sequence: Synthetic Construct
atgtgccaccaacagctcgtgatcagctggttctccctggtgttcctggctagccccctggtggccatctgggagctcaagaaagacgtgtacgtggtggaactggactggtaccccgacgcccctggcgaaatggtggtgctgacatgcgacacccctgaggaggatggcattacctggaccctcgatcagagctccgaggtgctgggcagcggcaaaaccctgaccatccaggtgaaggagtttggcgatgccggccagtacacatgtcacaagggcggcgaggtgctgagccactccctgctgctgctccacaagaaggaagatggcatctggagcaccgacattctgaaggatcagaaggagcccaagaacaagacattcctgaggtgtgaggccaagaactacagcggcaggtttacctgctggtggctgacaacaatcagcaccgacctcacattctccgtcaagtcctccaggggttcttccgaccctcaaggcgtgacatgcggcgctgccaccctgagcgctgagagagtcaggggcgacaacaaggagtacgagtacagcgtcgaatgtcaggaggacagcgcctgtcccgccgctgaagagagcctgcctatcgaggtgatggtggacgccgtgcacaaactgaagtatgagaattacacctccagcttcttcatcagggacatcatcaaacccgatccccccaagaacctgcagctgaagcctctgaagaacagcagacaggtcgaagtgtcctgggagtaccctgatacctggtccacaccccacagctacttcagcctgaccttttgcgtgcaggtgcagggcaagagcaaaagggagaagaaggacagggtgtttaccgacaagacctccgccacagtgatttgcagaaagaacgcctccatcagcgtgagggcccaggacaggtattacagcagctcctggagcgaatgggctagcgtgccctgtagcggaggaggaggcagcggaggaggaggttctggaggaggcggcagcagaaacctgcctgtcgctacccccgaccccggaatgttcccctgcctgcaccactcccagaacctcctgagggccgtgtccaacatgctgcagaaggctagacagaccctcgaattctacccctgtaccagcgaggagatcgaccatgaggacatcaccaaggataagaccagcaccgtggaggcttgcctgcctctggagctgaccaaaaacgagagctgcctgaacagcagggaaaccagcttcattaccaacggctcctgcctggcctccaggaagacatccttcatgatggccctgtgcctcagcagcatctacgaggacctgaagatgtatcaggtggagtttaagaccatgaatgccaagctgctgatggaccctaagaggcagatcttcctggaccagaatatgctggccgtgattgacgagctgatgcaggccctcaactttaacagcgagaccgtgccccagaaaagcagcctcgaagagcctgacttctacaaaaccaagattaagctgtgtatcctgctgcacgccttcaggatcagggccgtgaccatcgacagggtgatgagctacctgaacgccagcggatcctcactggcgctcagccttactgccgaccaaatggtatcagctcttctggacgcagaacccccaattctttattccgagtacgaccccacacgcccgttcagtgaagcttccatgatgggcctccttacgaaccttgccgaccgggaactcgtgcacatgatcaattgggcgaagcgggtgccggggttcgtagatttgacacttcacgaccaagttcatctcttggaatgtgcttggatggagatattgatgatcggactcgtgtggaggtcaatggagcatcctggtaaacttcttttcgcacccaatctgctcttggatagagtgcagggtaagtgcgtcgagggtggcgttgaaatcttcgacatgctccttgcgacatccagccgattccgaatgatgaatcttcaaggagaggaatttgtctgtcttaagagcattatactcctcaatagtggagtttacaccttcttgtcctctacactgaaatcacttgaggaaaaagatcacatacatagggtgttggataaaatcacggatacactcatacatctgatggcaaaagcaggattgaccctgcaacagcagcaccaacgactggcccaactgctgttgatccttagccatatcagacacatgtctaacaaaaggatggaacatttgtacagcatgaaatgtaagaacgtagtgccactgtccgatttgttgctggaaatgctggacgctcatcggctctga

SEQ ID NO: 184 - protein, 787 aa, Artificial Sequence
  Description of Artificial Sequence: Synthetic Construct
MCHQQLVISWFSLVFLASPLVAIWELKKDVYVVELDWYPDAPGEMVVLTCDTPEEDGITWTLDQSSEVLGSGKTLTIQVKEFGDAGQYTCHKGGEVLSHSLLLLHKKEDGIWSTDILKDQKEPKNKTFLRCEAKNYSGRFTCWWLTTISTDLTFSVKSSRGSSDPQGVTCGAATLSAERVRGDNKEYEYSVECQEDSACPAAEESLPIEVMVDAVHKLKYENYTSSFFIRDIIKPDPPKNLQLKPLKNSRQVEVSWEYPDTWSTPHSYFSLTFCVQVQGKSKREKKDRVFTDKTSATVICRKNASISVRAQDRYYSSSWSEWASVPCSGGGGSGGGGSGGGGSRNLPVATPDPGMFPCLHHSQNLLRAVSNMLQKARQTLEFYPCTSEEIDHEDITKDKTSTVEACLPLELTKNESCLNSRETSFITNGSCLASRKTSFMMALCLSSIYEDLKMYQVEFKTMNAKLLMDPKRQIFLDQNMLAVIDELMQALNFNSETVPQKSSLEEPDFYKTKIKLCILLHAFRIRAVTIDRVMSYLNASGSSLALSLTADQMVSALLDAEPPILYSEYDPTRPFSEASMMGLLTNLADRELVHMINWAKRVPGFVDLTLHDQVHLLECAWMEILMIGLVWRSMEHPGKLLFAPNLLLDRSQGKCVEGGVEIFDMLLATSSRFRMMNLQGEEFVCLKSIILLNSGVYTFLSSTLKSLEEKDHIHRVLDKITDTLIHLMAKAGLTLQQQHQRLAQLLLILSHIRHMSNKRMEHLYSMKCKNVVPLSDLLLEMLDAHRL

SEQ ID NO: 185 - DNA, 2364 bp, Artificial Sequence
  Description of Artificial Sequence: Synthetic Construct
atgtgccaccaacagctcgtgatcagctggttctccctggtgttcctggctagccccctggtggccatctgggagctcaagaaagacgtgtacgtggtggaactggactggtaccccgacgcccctggcgaaatggtggtgctgacatgcgacacccctgaggaggatggcattacctggaccctcgatcagagctccgaggtgctgggcagcggcaaaaccctgaccatccaggtgaaggagtttggcgatgccggccagtacacatgtcacaagggcggcgaggtgctgagccactccctgctgctgctccacaagaaggaagatggcatctggagcaccgacattctgaaggatcagaaggagcccaagaacaagacattcctgaggtgtgaggccaagaactacagcggcaggtttacctgctggtggctgacaacaatcagcaccgacctcacattctccgtcaagtcctccaggggttcttccgaccctcaaggcgtgacatgcggcgctgccaccctgagcgctgagagagtcaggggcgacaacaaggagtacgagtacagcgtcgaatgtcaggaggacagcgcctgtcccgccgctgaagagagcctgcctatcgaggtgatggtggacgccgtgcacaaactgaagtatgagaattacacctccagcttcttcatcagggacatcatcaaacccgatccccccaagaacctgcagctgaagcctctgaagaacagcagacaggtcgaagtgtcctgggagtaccctgatacctggtccacaccccacagctacttcagcctgaccttttgcgtgcaggtgcagggcaagagcaaaagggagaagaaggacagggtgtttaccgacaagacctccgccacagtgatttgcagaaagaacgcctccatcagcgtgagggcccaggacaggtattacagcagctcctggagcgaatgggctagcgtgccctgtagcggaggaggaggcagcggaggaggaggttctggaggaggcggcagcagaaacctgcctgtcgctacccccgaccccggaatgttcccctgcctgcaccactcccagaacctcctgagggccgtgtccaacatgctgcagaaggctagacagaccctcgaattctacccctgtaccagcgaggagatcgaccatgaggacatcaccaaggataagaccagcaccgtggaggcttgcctgcctctggagctgaccaaaaacgagagctgcctgaacagcagggaaaccagcttcattaccaacggctcctgcctggcctccaggaagacatccttcatgatggccctgtgcctcagcagcatctacgaggacctgaagatgtatcaggtggagtttaagaccatgaatgccaagctgctgatggaccctaagaggcagatcttcctggaccagaatatgctggccgtgattgacgagctgatgcaggccctcaactttaacagcgagaccgtgccccagaaaagcagcctcgaagagcctgacttctacaaaaccaagattaagctgtgtatcctgctgcacgccttcaggatcagggccgtgaccatcgacagggtgatgagctacctgaacgccagcggatcctcactggcgctcagccttactgccgaccaaatggtatcagctcttctggacgcagaacccccaattctttattccgagtacgaccccacacgcccgttcagtgaagcttccatgatgggcctccttacgaaccttgccgaccgggaactcgtgcacatgatcaattgggcgaagcgggtgccggggttcgtagatttgacacttcacgaccaagttcatctcttggaatgtgcttggatggagatattgatgatcggactcgtgtggaggtcaatggagcatcctggtaaacttcttttcgcacccaatctgctcttggatagaagccagggtaagtgcgtcgagggtggcgttgaaatcttcgacatgctccttgcgacatccagccgattccgaatgatgaatcttcaaggagaggaatttgtctgtcttaagagcattatactcctcaatagtggagtttacaccttcttgtcctctacactgaaatcacttgaggaaaaagatcacatacatagggtgttggataaaatcacggatacactcatacatctgatggcaaaagcaggattgaccctgcaacagcagcaccaacgactggcccaactgctgttgatccttagccatatcagacacatgtctaacaaaaggatggaacatttgtacagcatgaaatgtaagaacgtagtgccactgtccgatttgttgctggaaatgctggacgctcatcggctctga

SEQ ID NO: 186 - protein, 787 aa, Artificial Sequence
  Description of Artificial Sequence: Synthetic Construct
MCHQQLVISWFSLVFLASPLVAIWELKKDVYVVELDWYPDAPGEMVVLTCDTPEEDGITWTLDQSSEVLGSGKTLTIQVKEFGDAGQYTCHKGGEVLSHSLLLLHKKEDGIWSTDILKDQKEPKNKTFLRCEAKNYSGRFTCWWLTTISTDLTFSVKSSRGSSDPQGVTCGAATLSAERVRGDNKEYEYSVECQEDSACPAAEESLPIEVMVDAVHKLKYENYTSSFFIRDIIKPDPPKNLQLKPLKNSRQVEVSWEYPDTWSTPHSYFSLTFCVQVQGKSKREKKDRVFTDKTSATVICRKNASISVRAQDRYYSSSWSEWASVPCSGGGGSGGGGSGGGGSRNLPVATPDPGMFPCLHHSQNLLRAVSNMLQKARQTLEFYPCTSEEIDHEDITKDKTSTVEACLPLELTKNESCLNSRETSFITNGSCLASRKTSFMMALCLSSIYEDLKMYQVEFKTMNAKLLMDPKRQIFLDQNMLAVIDELMQALNFNSETVPQKSSLEEPDFYKTKIKLCILLHAFRIRAVTIDRVMSYLNASGSSLALSLTADQMVSALLDAEPPILYSEYDPTRPFSEASMMGLLTNLADRELVHMINWAKRVPGFVDLTLHDQVHLLECAWMEILMIGLVWRSMEHPGKLLFAPNLLLDRCQGKCVEGGVEIFDMLLATSSRFRMMNLQGEEFVCLKSIILLNSGVYTFLSSTLKSLEEKDHIHRVLDKITDTLIHLMAKAGLTLQQQHQRLAQLLLILSHIRHMSNKRMEHLYSMKCKNVVPLSDLLLEMLDAHRL

SEQ ID NO: 187 - DNA, 2364 bp, Artificial Sequence
  Description of Artificial Sequence: Synthetic Construct
atgtgccaccaacagctcgtgatcagctggttctccctggtgttcctggctagccccctggtggccatctgggagctcaagaaagacgtgtacgtggtggaactggactggtaccccgacgcccctggcgaaatggtggtgctgacatgcgacacccctgaggaggatggcattacctggaccctcgatcagagctccgaggtgctgggcagcggcaaaaccctgaccatccaggtgaaggagtttggcgatgccggccagtacacatgtcacaagggcggcgaggtgctgagccactccctgctgctgctccacaagaaggaagatggcatctggagcaccgacattctgaaggatcagaaggagcccaagaacaagacattcctgaggtgtgaggccaagaactacagcggcaggtttacctgctggtggctgacaacaatcagcaccgacctcacattctccgtcaagtcctccaggggttcttccgaccctcaaggcgtgacatgcggcgctgccaccctgagcgctgagagagtcaggggcgacaacaaggagtacgagtacagcgtcgaatgtcaggaggacagcgcctgtcccgccgctgaagagagcctgcctatcgaggtgatggtggacgccgtgcacaaactgaagtatgagaattacacctccagcttcttcatcagggacatcatcaaacccgatccccccaagaacctgcagctgaagcctctgaagaacagcagacaggtcgaagtgtcctgggagtaccctgatacctggtccacaccccacagctacttcagcctgaccttttgcgtgcaggtgcagggcaagagcaaaagggagaagaaggacagggtgtttaccgacaagacctccgccacagtgatttgcagaaagaacgcctccatcagcgtgagggcccaggacaggtattacagcagctcctggagcgaatgggctagcgtgccctgtagcggaggaggaggcagcggaggaggaggttctggaggaggcggcagcagaaacctgcctgtcgctacccccgaccccggaatgttcccctgcctgcaccactcccagaacctcctgagggccgtgtccaacatgctgcagaaggctagacagaccctcgaattctacccctgtaccagcgaggagatcgaccatgaggacatcaccaaggataagaccagcaccgtggaggcttgcctgcctctggagctgaccaaaaacgagagctgcctgaacagcagggaaaccagcttcattaccaacggctcctgcctggcctccaggaagacatccttcatgatggccctgtgcctcagcagcatctacgaggacctgaagatgtatcaggtggagtttaagaccatgaatgccaagctgctgatggaccctaagaggcagatcttcctggaccagaatatgctggccgtgattgacgagctgatgcaggccctcaactttaacagcgagaccgtgccccagaaaagcagcctcgaagagcctgacttctacaaaaccaagattaagctgtgtatcctgctgcacgccttcaggatcagggccgtgaccatcgacagggtgatgagctacctgaacgccagcggatcctcactggcgctcagccttactgccgaccaaatggtatcagctcttctggacgcagaacccccaattctttattccgagtacgaccccacacgcccgttcagtgaagcttccatgatgggcctccttacgaaccttgccgaccgggaactcgtgcacatgatcaattgggcgaaacgggtgccggggttcgtagatttgacacttcacgaccaagttcatctcttggaatgtgcttggatggagatattgatgatcggactcgtgtggaggtcaatggagcatcctggtaaacttcttttcgcacccaatctgctcttggatagatgccagggtaagtgcgtcgagggtggcgttgaaatcttcgacatgctccttgcgacatccagccgattccgaatgatgaatcttcaaggagaggaatttgtctgtcttaagagcattatactcctcaatagtggagtttacaccttcttgtcctctacactgaaatcacttgaggaaaaagatcacatacatagggtgttggataaaatcacggatacactcatacatctgatggcaaaagcaggattgaccctgcaacagcagcaccaacgactggcccaactgctgttgatccttagccatatcagacacatgtctaacaaaaggatggaacatttgtacagcatgaaatgtaagaacgtagtgccactgtccgatttgttgctggaaatgctggacgctcatcggctctga

SEQ ID NO: 188 - protein, 787 aa, Artificial Sequence
  Description of Artificial Sequence: Synthetic Construct
MCHQQLVISWFSLVFLASPLVAIWELKKDVYVVELDWYPDAPGEMVVLTCDTPEEDGITWTLDQSSEVLGSGKTLTIQVKEFGDAGQYTCHKGGEVLSHSLLLLHKKEDGIWSTDILKDQKEPKNKTFLRCEAKNYSGRFTCWWLTTISTDLTFSVKSSRGSSDPQGVTCGAATLSAERVRGDNKEYEYSVECQEDSACPAAEESLPIEVMVDAVHKLKYENYTSSFFIRDIIKPDPPKNLQLKPLKNSRQVEVSWEYPDTWSTPHSYFSLTFCVQVQGKSKREKKDRVFTDKTSATVICRKNASISVRAQDRYYSSSWSEWASVPCSGGGGSGGGGSGGGGSRNLPVATPDPGMFPCLHHSQNLLRAVSNMLQKARQTLEFYPCTSEEIDHEDITKDKTSTVEACLPLELTKNESCLNSRETSFITNGSCLASRKTSFMMALCLSSIYEDLKMYQVEFKTMNAKLLMDPKRQIFLDQNMLAVIDELMQALNFNSETVPQKSSLEEPDFYKTKIKLCILLHAFRIRAVTIDRVMSYLNASGSSLALSLTADQMVSALLDAEPPILYSEYDPTRPFSEASMMGLLTNLADRELVHMINWAKRVPGFVDLTLHDQVHLLECAWMEILMIGLVWRSMEHPGKLLFAPNLLLDRWQGKCVEGGVEIFDMLLATSSRFRMMNLQGEEFVCLKSIILLNSGVYTFLSSTLKSLEEKDHIHRVLDKITDTLIHLMAKAGLTLQQQHQRLAQLLLILSHIRHMSNKRMEHLYSMKCKNVVPLSDLLLEMLDAHRL

SEQ ID NO: 189 - DNA, 2364 bp, Artificial Sequence
  Description of Artificial Sequence: Synthetic Construct
atgtgccaccaacagctcgtgatcagctggttctccctggtgttcctggctagccccctggtggccatctgggagctcaagaaagacgtgtacgtggtggaactggactggtaccccgacgcccctggcgaaatggtggtgctgacatgcgacacccctgaggaggatggcattacctggaccctcgatcagagctccgaggtgctgggcagcggcaaaaccctgaccatccaggtgaaggagtttggcgatgccggccagtacacatgtcacaagggcggcgaggtgctgagccactccctgctgctgctccacaagaaggaagatggcatctggagcaccgacattctgaaggatcagaaggagcccaagaacaagacattcctgaggtgtgaggccaagaactacagcggcaggtttacctgctggtggctgacaacaatcagcaccgacctcacattctccgtcaagtcctccaggggttcttccgaccctcaaggcgtgacatgcggcgctgccaccctgagcgctgagagagtcaggggcgacaacaaggagtacgagtacagcgtcgaatgtcaggaggacagcgcctgtcccgccgctgaagagagcctgcctatcgaggtgatggtggacgccgtgcacaaactgaagtatgagaattacacctccagcttcttcatcagggacatcatcaaacccgatccccccaagaacctgcagctgaagcctctgaagaacagcagacaggtcgaagtgtcctgggagtaccctgatacctggtccacaccccacagctacttcagcctgaccttttgcgtgcaggtgcagggcaagagcaaaagggagaagaaggacagggtgtttaccgacaagacctccgccacagtgatttgcagaaagaacgcctccatcagcgtgagggcccaggacaggtattacagcagctcctggagcgaatgggctagcgtgccctgtagcggaggaggaggcagcggaggaggaggttctggaggaggcggcagcagaaacctgcctgtcgctacccccgaccccggaatgttcccctgcctgcaccactcccagaacctcctgagggccgtgtccaacatgctgcagaaggctagacagaccctcgaattctacccctgtaccagcgaggagatcgaccatgaggacatcaccaaggataagaccagcaccgtggaggcttgcctgcctctggagctgaccaaaaacgagagctgcctgaacagcagggaaaccagcttcattaccaacggctcctgcctggcctccaggaagacatccttcatgatggccctgtgcctcagcagcatctacgaggacctgaagatgtatcaggtggagtttaagaccatgaatgccaagctgctgatggaccctaagaggcagatcttcctggaccagaatatgctggccgtgattgacgagctgatgcaggccctcaactttaacagcgagaccgtgccccagaaaagcagcctcgaagagcctgacttctacaaaaccaagattaagctgtgtatcctgctgcacgccttcaggatcagggccgtgaccatcgacagggtgatgagctacctgaacgccagcggatcctcactggcgctcagccttactgccgaccaaatggtatcagctcttctggacgcagaacccccaattctttattccgagtacgaccccacacgcccgttcagtgaagcttccatgatgggcctccttacgaaccttgccgaccgggaactcgtgcacatgatcaattgggcgaagcgggtgccggggttcgtagatttgacacttcacgaccaagttcatctcttggaatgtgcttggatggagatattgatgatcggactcgtgtggaggtcaatggagcatcctggtaaacttcttttcgcacccaatctgctcttggatagatggcagggtaagtgcgtcgagggtggcgttgaaatcttcgacatgctccttgcgacatccagccgattccgaatgatgaatcttcaaggagaggaatttgtctgtcttaagagcattatactcctcaatagtggagtttacaccttcttgtcctctacactgaaatcacttgaggaaaaagatcacatacatagggtgttggataaaatcacggatacactcatacatctgatggcaaaagcaggattgaccctgcaacagcagcaccaacgactggcccaactgctgttgatccttagccatatcagacacatgtctaacaaaaggatggaacatttgtacagcatgaaatgtaagaacgtagtgccactgtccgatttgttgctggaaatgctggacgctcatcggctctga

SEQ ID NO: 190 - protein, 787 aa, Artificial Sequence
  Description of Artificial Sequence: Synthetic Construct
MCHQQLVISWFSLVFLASPLVAIWELKKDVYVVELDWYPDAPGEMVVLTCDTPEEDGITWTLDQSSEVLGSGKTLTIQVKEFGDAGQYTCHKGGEVLSHSLLLLHKKEDGIWSTDILKDQKEPKNKTFLRCEAKNYSGRFTCWWLTTISTDLTFSVKSSRGSSDPQGVTCGAATLSAERVRGDNKEYEYSVECQEDSACPAAEESLPIEVMVDAVHKLKYENYTSSFFIRDIIKPDPPKNLQLKPLKNSRQVEVSWEYPDTWSTPHSYFSLTFCVQVQGKSKREKKDRVFTDKTSATVICRKNASISVRAQDRYYSSSWSEWASVPCSGGGGSGGGGSGGGGSRNLPVATPDPGMFPCLHHSQNLLRAVSNMLQKARQTLEFYPCTSEEIDHEDITKDKTSTVEACLPLELTKNESCLNSRETSFITNGSCLASRKTSFMMALCLSSIYEDLKMYQVEFKTMNAKLLMDPKRQIFLDQNMLAVIDELMQALNFNSETVPQKSSLEEPDFYKTKIKLCILLHAFRIRAVTIDRVMSYLNASGSSLALSLTADQMVSALLDAEPPILYSEYDPTRPFSEASMMGLLTNLADRELVHMINWAKRVPGFVDLTLHDQVHLLECAWMEILMIGLVWRSMEHPGKLLFAPNLLLDRPQGKCVEGGVEIFDMLLATSSRFRMMNLQGEEFVCLKSIILLNSGVYTFLSSTLKSLEEKDHIHRVLDKITDTLIHLMAKAGLTLQQQHQRLAQLLLILSHIRHMSNKRMEHLYSMKCKNVVPLSDLLLEMLDAHRL

SEQ ID NO: 191 - DNA, 2364 bp, Artificial Sequence
  Description of Artificial Sequence: Synthetic Construct
atgtgccaccaacagctcgtgatcagctggttctccctggtgttcctggctagccccctggtggccatctgggagctcaagaaagacgtgtacgtggtggaactggactggtaccccgacgcccctggcgaaatggtggtgctgacatgcgacacccctgaggaggatggcattacctggaccctcgatcagagctccgaggtgctgggcagcggcaaaaccctgaccatccaggtgaaggagtttggcgatgccggccagtacacatgtcacaagggcggcgaggtgctgagccactccctgctgctgctccacaagaaggaagatggcatctggagcaccgacattctgaaggatcagaaggagcccaagaacaagacattcctgaggtgtgaggccaagaactacagcggcaggtttacctgctggtggctgacaacaatcagcaccgacctcacattctccgtcaagtcctccaggggttcttccgaccctcaaggcgtgacatgcggcgctgccaccctgagcgctgagagagtcaggggcgacaacaaggagtacgagtacagcgtcgaatgtcaggaggacagcgcctgtcccgccgctgaagagagcctgcctatcgaggtgatggtggacgccgtgcacaaactgaagtatgagaattacacctccagcttcttcatcagggacatcatcaaacccgatccccccaagaacctgcagctgaagcctctgaagaacagcagacaggtcgaagtgtcctgggagtaccctgatacctggtccacaccccacagctacttcagcctgaccttttgcgtgcaggtgcagggcaagagcaaaagggagaagaaggacagggtgtttaccgacaagacctccgccacagtgatttgcagaaagaacgcctccatcagcgtgagggcccaggacaggtattacagcagctcctggagcgaatgggctagcgtgccctgtagcggaggaggaggcagcggaggaggaggttctggaggaggcggcagcagaaacctgcctgtcgctacccccgaccccggaatgttcccctgcctgcaccactcccagaacctcctgagggccgtgtccaacatgctgcagaaggctagacagaccctcgaattctacccctgtaccagcgaggagatcgaccatgaggacatcaccaaggataagaccagcaccgtggaggcttgcctgcctctggagctgaccaaaaacgagagctgcctgaacagcagggaaaccagcttcattaccaacggctcctgcctggcctccaggaagacatccttcatgatggccctgtgcctcagcagcatctacgaggacctgaagatgtatcaggtggagtttaagaccatgaatgccaagctgctgatggaccctaagaggcagatcttcctggaccagaatatgctggccgtgattgacgagctgatgcaggccctcaactttaacagcgagaccgtgccccagaaaagcagcctcgaagagcctgacttctacaaaaccaagattaagctgtgtatcctgctgcacgccttcaggatcagggccgtgaccatcgacagggtgatgagctacctgaacgccagcggatcctcactggcgctcagccttactgccgaccaaatggtatcagctcttctggacgcagaacccccaattctttattccgagtacgaccccacacgcccgttcagtgaagcttccatgatgggcctccttacgaaccttgccgaccgggaactcgtgcacatgatcaattgggcgaagcgggtgccggggttcgtagatttgacacttcacgaccaagttcatctcttggaatgtgcttggatggagatattgatgatcggactcgtgtggaggtcaatggagcatcctggtaaacttcttttcgcacccaatctgctcttggatagaccccagggtaagtgcgtcgagggtggcgttgaaatcttcgacatgctccttgcgacatccagccgattccgaatgatgaatcttcaaggagaggaatttgtctgtcttaagagcattatactcctcaatagtggagtttacaccttcttgtcctctacactgaaatcacttgaggaaaaagatcacatacatagggtgttggataaaatcacggatacactcatacatctgatggcaaaagcaggattgaccctgcaacagcagcaccaacgactggcccaactgctgttgatccttagccatatcagacacatgtctaacaaaaggatggaacatttgtacagcatgaaatgtaagaacgtagtgccactgtccgatttgttgctggaaatgctggacgctcatcggctctga

SEQ ID NO: 192 - protein, 787 aa, Artificial Sequence
  Description of Artificial Sequence: Synthetic Construct
MCHQQLVISWFSLVFLASPLVAIWELKKDVYVVELDWYPDAPGEMVVLTCDTPEEDGITWTLDQSSEVLGSGKTLTIQVKEFGDAGQYTCHKGGEVLSHSLLLLHKKEDGIWSTDILKDQKEPKNKTFLRCEAKNYSGRFTCWWLTTISTDLTFSVKSSRGSSDPQGVTCGAATLSAERVRGDNKEYEYSVECQEDSACPAAEESLPIEVMVDAVHKLKYENYTSSFFIRDIIKPDPPKNLQLKPLKNSRQVEVSWEYPDTWSTPHSYFSLTFCVQVQGKSKREKKDRVFTDKTSATVICRKNASISVRAQDRYYSSSWSEWASVPCSGGGGSGGGGSGGGGSRNLPVATPDPGMFPCLHHSQNLLRAVSNMLQKARQTLEFYPCTSEEIDHEDITKDKTSTVEACLPLELTKNESCLNSRETSFITNGSCLASRKTSFMMALCLSSIYEDLKMYQVEFKTMNAKLLMDPKRQIFLDQNMLAVIDELMQALNFNSETVPQKSSLEEPDFYKTKIKLCILLHAFRIRAVTIDRVMSYLNASGSSLALSLTADQMVSALLDAEPPILYSEYDPTRPFSEASMMGLLTNLADRELVHMINWAKRVPGFVDLTLHDQVHLLECAWMEILMIGLVWRSMEHPGKLLFAPNLLLDRRQGKCVEGGVEIFDMLLATSSRFRMMNLQGEEFVCLKSIILLNSGVYTFLSSTLKSLEEKDHIHRVLDKITDTLIHLMAKAGLTLQQQHQRLAQLLLILSHIRHMSNKRMEHLYSMKCKNVVPLSDLLLEMLDAHRL

SEQ ID NO: 193 - DNA, 2364 bp, Artificial Sequence
  Description of Artificial Sequence: Synthetic Construct
atgtgccaccaacagctcgtgatcagctggttctccctggtgttcctggctagccccctggtggccatctgggagctcaagaaagacgtgtacgtggtggaactggactggtaccccgacgcccctggcgaaatggtggtgctgacatgcgacacccctgaggaggatggcattacctggaccctcgatcagagctccgaggtgctgggcagcggcaaaaccctgaccatccaggtgaaggagtttggcgatgccggccagtacacatgtcacaagggcggcgaggtgctgagccactccctgctgctgctccacaagaaggaagatggcatctggagcaccgacattctgaaggatcagaaggagcccaagaacaagacattcctgaggtgtgaggccaagaactacagcggcaggtttacctgctggtggctgacaacaatcagcaccgacctcacattctccgtcaagtcctccaggggttcttccgaccctcaaggcgtgacatgcggcgctgccaccctgagcgctgagagagtcaggggcgacaacaaggagtacgagtacagcgtcgaatgtcaggaggacagcgcctgtcccgccgctgaagagagcctgcctatcgaggtgatggtggacgccgtgcacaaactgaagtatgagaattacacctccagcttcttcatcagggacatcatcaaacccgatccccccaagaacctgcagctgaagcctctgaagaacagcagacaggtcgaagtgtcctgggagtaccctgatacctggtccacaccccacagctacttcagcctgaccttttgcgtgcaggtgcagggcaagagcaaaagggagaagaaggacagggtgtttaccgacaagacctccgccacagtgatttgcagaaagaacgcctccatcagcgtgagggcccaggacaggtattacagcagctcctggagcgaatgggctagcgtgccctgtagcggaggaggaggcagcggaggaggaggttctggaggaggcggcagcagaaacctgcctgtcgctacccccgaccccggaatgttcccctgcctgcaccactcccagaacctcctgagggccgtgtccaacatgctgcagaaggctagacagaccctcgaattctacccctgtaccagcgaggagatcgaccatgaggacatcaccaaggataagaccagcaccgtggaggcttgcctgcctctggagctgaccaaaaacgagagctgcctgaacagcagggaaaccagcttcattaccaacggctcctgcctggcctccaggaagacatccttcatgatggccctgtgcctcagcagcatctacgaggacctgaagatgtatcaggtggagtttaagaccatgaatgccaagctgctgatggaccctaagaggcagatcttcctggaccagaatatgctggccgtgattgacgagctgatgcaggccctcaactttaacagcgagaccgtgccccagaaaagcagcctcgaagagcctgacttctacaaaaccaagattaagctgtgtatcctgctgcacgccttcaggatcagggccgtgaccatcgacagggtgatgagctacctgaacgccagcggatcctcactggcgctcagccttactgccgaccaaatggtatcagctcttctggacgcagaacccccaattctttattccgagtacgaccccacacgcccgttcagtgaagcttccatgatgggcctccttacgaaccttgccgaccgggaactcgtgcacatgatcaattgggcgaagcgggtgccggggttcgtagatttgacacttcacgaccaagttcatctcttggaatgtgcttggatggagatattgatgatcggactcgtgtggaggtcaatggagcatcctggtaaacttcttttcgcacccaatctgctcttggatagacgacagggtaagtgcgtcgagggtggcgttgaaatcttcgacatgctccttgcgacatccagccgattccgaatgatgaatcttcaaggagaggaatttgtctgtcttaagagcattatactcctcaatagtggagtttacaccttcttgtcctctacactgaaatcacttgaggaaaaagatcacatacatagggtgttggataaaatcacggatacactcatacatctgatggcaaaagcaggattgaccctgcaacagcagcaccaacgactggcccaactgctgttgatccttagccatatcagacacatgtctaacaaaaggatggaacatttgtacagcatgaaatgtaagaacgtagtgccactgtccgatttgttgctggaaatgctggacgctcatcggctctga

SEQ ID NO: 194 - protein, 787 aa, Artificial Sequence
  Description of Artificial Sequence: Synthetic Construct
MCHQQLVISWFSLVFLASPLVAIWELKKDVYVVELDWYPDAPGEMVVLTCDTPEEDGITWTLDQSSEVLGSGKTLTIQVKEFGDAGQYTCHKGGEVLSHSLLLLHKKEDGIWSTDILKDQKEPKNKTFLRCEAKNYSGRFTCWWLTTISTDLTFSVKSSRGSSDPQGVTCGAATLSAERVRGDNKEYEYSVECQEDSACPAAEESLPIEVMVDAVHKLKYENYTSSFFIRDIIKPDPPKNLQLKPLKNSRQVEVSWEYPDTWSTPHSYFSLTFCVQVQGKSKREKKDRVFTDKTSATVICRKNASISVRAQDRYYSSSWSEWASVPCSGGGGSGGGGSGGGGSRNLPVATPDPGMFPCLHHSQNLLRAVSNMLQKARQTLEFYPCTSEEIDHEDITKDKTSTVEACLPLELTKNESCLNSRETSFITNGSCLASRKTSFMMALCLSSIYEDLKMYQVEFKTMNAKLLMDPKRQIFLDQNMLAVIDELMQALNFNSETVPQKSSLEEPDFYKTKIKLCILLHAFRIRAVTIDRVMSYLNASGSSLALSLTADQMVSALLDAEPPILYSEYDPTRPFSEASMMGLLTNLADRELVHMINWAKRVPGFVDLTLHDQVHLLECAWMEILMIGLVWRSMEHPGKLLFAPNLLLDRTQGKCVEGGVEIFDMLLATSSRFRMMNLQGEEFVCLKSIILLNSGVYTFLSSTLKSLEEKDHIHRVLDKITDTLIHLMAKAGLTLQQQHQRLAQLLLILSHIRHMSNKRMEHLYSMKCKNVVPLSDLLLEMLDAHRL

SEQ ID NO: 195 - DNA, 2364 bp, Artificial Sequence
  Description of Artificial Sequence: Synthetic Construct
atgtgccaccaacagctcgtgatcagctggttctccctggtgttcctggctagccccctggtggccatctgggagctcaagaaagacgtgtacgtggtggaactggactggtaccccgacgcccctggcgaaatggtggtgctgacatgcgacacccctgaggaggatggcattacctggaccctcgatcagagctccgaggtgctgggcagcggcaaaaccctgaccatccaggtgaaggagtttggcgatgccggccagtacacatgtcacaagggcggcgaggtgctgagccactccctgctgctgctccacaagaaggaagatggcatctggagcaccgacattctgaaggatcagaaggagcccaagaacaagacattcctgaggtgtgaggccaagaactacagcggcaggtttacctgctggtggctgacaacaatcagcaccgacctcacattctccgtcaagtcctccaggggttcttccgaccctcaaggcgtgacatgcggcgctgccaccctgagcgctgagagagtcaggggcgacaacaaggagtacgagtacagcgtcgaatgtcaggaggacagcgcctgtcccgccgctgaagagagcctgcctatcgaggtgatggtggacgccgtgcacaaactgaagtatgagaattacacctccagcttcttcatcagggacatcatcaaacccgatccccccaagaacctgcagctgaagcctctgaagaacagcagacaggtcgaagtgtcctgggagtaccctgatacctggtccacaccccacagctacttcagcctgaccttttgcgtgcaggtgcagggcaagagcaaaagggagaagaaggacagggtgtttaccgacaagacctccgccacagtgatttgcagaaagaacgcctccatcagcgtgagggcccaggacaggtattacagcagctcctggagcgaatgggctagcgtgccctgtagcggaggaggaggcagcggaggaggaggttctggaggaggcggcagcagaaacctgcctgtcgctacccccgaccccggaatgttcccctgcctgcaccactcccagaacctcctgagggccgtgtccaacatgctgcagaaggctagacagaccctcgaattctacccctgtaccagcgaggagatcgaccatgaggacatcaccaaggataagaccagcaccgtggaggcttgcctgcctctggagctgaccaaaaacgagagctgcctgaacagcagggaaaccagcttcattaccaacggctcctgcctggcctccaggaagacatccttcatgatggccctgtgcctcagcagcatctacgaggacctgaagatgtatcaggtggagtttaagaccatgaatgccaagctgctgatggaccctaagaggcagatcttcctggaccagaatatgctggccgtgattgacgagctgatgcaggccctcaactttaacagcgagaccgtgccccagaaaagcagcctcgaagagcctgacttctacaaaaccaagattaagctgtgtatcctgctgcacgccttcaggatcagggccgtgaccatcgacagggtgatgagctacctgaacgccagcggatcctcactggcgctcagccttactgccgaccaaatggtatcagctcttctggacgcagaacccccaattctttattccgagtacgaccccacacgcccgttcagtgaagcttccatgatgggcctccttacgaaccttgccgaccgggaactcgtgcacatgatcaattgggcgaagcgggtgccggggttcgtagatttgacacttcacgaccaagttcatctcttggaatgtgcttggatggagatattgatgatcggactcgtgtggaggtcaatggagcatcctggtaaacttcttttcgcacccaatctgctcttggatagaacccagggtaagtgcgtcgagggtggcgttgaaatcttcgacatgctccttgcgacatccagccgattccgaatgatgaatcttcaaggagaggaatttgtctgtcttaagagcattatactcctcaatagtggagtttacaccttcttgtcctctacactgaaatcacttgaggaaaaagatcacatacatagggtgttggataaaatcacggatacactcatacatctgatggcaaaagcaggattgaccctgcaacagcagcaccaacgactggcccaactgctgttgatccttagccatatcagacacatgtctaacaaaaggatggaacatttgtacagcatgaaatgtaagaacgtagtgccactgtccgatttgttgctggaaatgctggacgctcatcggctctga

SEQ ID NO: 196 - protein, 787 aa, Artificial Sequence
  Description of Artificial Sequence: Synthetic Construct
MCHQQLVISWFSLVFLASPLVAIWELKKDVYVVELDWYPDAPGEMVVLTCDTPEEDGITWTLDQSSEVLGSGKTLTIQVKEFGDAGQYTCHKGGEVLSHSLLLLHKKEDGIWSTDILKDQKEPKNKTFLRCEAKNYSGRFTCWWLTTISTDLTFSVKSSRGSSDPQGVTCGAATLSAERVRGDNKEYEYSVECQEDSACPAAEESLPIEVMVDAVHKLKYENYTSSFFIRDIIKPDPPKNLQLKPLKNSRQVEVSWEYPDTWSTPHSYFSLTFCVQVQGKSKREKKDRVFTDKTSATVICRKNASISVRAQDRYYSSSWSEWASVPCSGGGGSGGGGSGGGGSRNLPVATPDPGMFPCLHHSQNLLRAVSNMLQKARQTLEFYPCTSEEIDHEDITKDKTSTVEACLPLELTKNESCLNSRETSFITNGSCLASRKTSFMMALCLSSIYEDLKMYQVEFKTMNAKLLMDPKRQIFLDQNMLAVIDELMQALNFNSETVPQKSSLEEPDFYKTKIKLCILLHAFRIRAVTIDRVMSYLNASGSSLALSLTADQMVSALLDAEPPILYSEYDPTRPFSEASMMGLLTNLADRELVHMINWAKRVPGFVDLTLHDQVHLLECAWMEILMIGLVWRSMEHPGKLLFAPNLLLDRAQGKCVEGGVEIFDMLLATSSRFRMMNLQGEEFVCLKSIILLNSGVYTFLSSTLKSLEEKDHIHRVLDKITDTLIHLMAKAGLTLQQQHQRLAQLLLILSHIRHMSNKRMEHLYSMKCKNVVPLSDLLLEMLDAHRL

SEQ ID NO: 197 - DNA, 2364 bp, Artificial Sequence
  Description of Artificial Sequence: Synthetic Construct
atgtgccaccaacagctcgtgatcagctggttctccctggtgttcctggctagccccctggtggccatctgggagctcaagaaagacgtgtacgtggtggaactggactggtaccccgacgcccctggcgaaatggtggtgctgacatgcgacacccctgaggaggatggcattacctggaccctcgatcagagctccgaggtgctgggcagcggcaaaaccctgaccatccaggtgaaggagtttggcgatgccggccagtacacatgtcacaagggcggcgaggtgctgagccactccctgctgctgctccacaagaaggaagatggcatctggagcaccgacattctgaaggatcagaaggagcccaagaacaagacattcctgaggtgtgaggccaagaactacagcggcaggtttacctgctggtggctgacaacaatcagcaccgacctcacattctccgtcaagtcctccaggggttcttccgaccctcaaggcgtgacatgcggcgctgccaccctgagcgctgagagagtcaggggcgacaacaaggagtacgagtacagcgtcgaatgtcaggaggacagcgcctgtcccgccgctgaagagagcctgcctatcgaggtgatggtggacgccgtgcacaaactgaagtatgagaattacacctccagcttcttcatcagggacatcatcaaacccgatccccccaagaacctgcagctgaagcctctgaagaacagcagacaggtcgaagtgtcctgggagtaccctgatacctggtccacaccccacagctacttcagcctgaccttttgcgtgcaggtgcagggcaagagcaaaagggagaagaaggacagggtgtttaccgacaagacctccgccacagtgatttgcagaaagaacgcctccatcagcgtgagggcccaggacaggtattacagcagctcctggagcgaatgggctagcgtgccctgtagcggaggaggaggcagcggaggaggaggttctggaggaggcggcagcagaaacctgcctgtcgctacccccgaccccggaatgttcccctgcctgcaccactcccagaacctcctgagggccgtgtccaacatgctgcagaaggctagacagaccctcgaattctacccctgtaccagcgaggagatcgaccatgaggacatcaccaaggataagaccagcaccgtggaggcttgcctgcctctggagctgaccaaaaacgagagctgcctgaacagcagggaaaccagcttcattaccaacggctcctgcctggcctccaggaagacatccttcatgatggccctgtgcctcagcagcatctacgaggacctgaagatgtatcaggtggagtttaagaccatgaatgccaagctgctgatggaccctaagaggcagatcttcctggaccagaatatgctggccgtgattgacgagctgatgcaggccctcaactttaacagcgagaccgtgccccagaaaagcagcctcgaagagcctgacttctacaaaaccaagattaagctgtgtatcctgctgcacgccttcaggatcagggccgtgaccatcgacagggtgatgagctacctgaacgccagcggatcctcactggcgctcagccttactgccgaccaaatggtatcagctcttctggacgcagaacccccaattctttattccgagtacgaccccacacgcccgttcagtgaagcttccatgatgggcctccttacgaaccttgccgaccgggaactcgtgcacatgatcaattgggcgaagcgggtgccggggttcgtagatttgacacttcacgaccaagttcatctcttggaatgtgcttggatggagatattgatgatcggactcgtgtggaggtcaatggagcatcctggtaaacttcttttcgcacccaatctgctcttggatagagcccagggtaagtgcgtcgagggtggcgttgaaatcttcgacatgctccttgcgacatccagccgattccgaatgatgaatcttcaaggagaggaatttgtctgtcttaagagcattatactcctcaatagtggagtttacaccttcttgtcctctacactgaaatcacttgaggaaaaagatcacatacatagggtgttggataaaatcacggatacactcatacatctgatggcaaaagcaggattgaccctgcaacagcagcaccaacgactggcccaactgctgttgatccttagccatatcagacacatgtctaacaaaaggatggaacatttgtacagcatgaaatgtaagaacgtagtgccactgtccgatttgttgctggaaatgctggacgctcatcggctctga

SEQ ID NO: 198 - protein, 787 aa, Artificial Sequence
  Description of Artificial Sequence: Synthetic Construct
MCHQQLVISWFSLVFLASPLVAIWELKKDVYVVELDWYPDAPGEMVVLTCDTPEEDGITWTLDQSSEVLGSGKTLTIQVKEFGDAGQYTCHKGGEVLSHSLLLLHKKEDGIWSTDILKDQKEPKNKTFLRCEAKNYSGRFTCWWLTTISTDLTFSVKSSRGSSDPQGVTCGAATLSAERVRGDNKEYEYSVECQEDSACPAAEESLPIEVMVDAVHKLKYENYTSSFFIRDIIKPDPPKNLQLKPLKNSRQVEVSWEYPDTWSTPHSYFSLTFCVQVQGKSKREKKDRVFTDKTSATVICRKNASISVRAQDRYYSSSWSEWASVPCSGGGGSGGGGSGGGGSRNLPVATPDPGMFPCLHHSQNLLRAVSNMLQKARQTLEFYPCTSEEIDHEDITKDKTSTVEACLPLELTKNESCLNSRETSFITNGSCLASRKTSFMMALCLSSIYEDLKMYQVEFKTMNAKLLMDPKRQIFLDQNMLAVIDELMQALNFNSETVPQKSSLEEPDFYKTKIKLCILLHAFRIRAVTIDRVMSYLNASGSSLALSLTADQMVSALLDAEPPILYSEYDPTRPFSEASMMGLLTNLADRELVHMINWAKRVPGFVDLTLHDQVHLLECAWMEILMIGLVWRSMEHPGKLLFAPNLLLDREQGKCVEGGVEIFDMLLATSSRFRMMNLQGEEFVCLKSIILLNSGVYTFLSSTLKSLEEKDHIHRVLDKITDTLIHLMAKAGLTLQQQHQRLAQLLLILSHIRHMSNKRMEHLYSMKCKNVVPLSDLLLEMLDAHRL

SEQ ID NO: 199 - DNA, 2364 bp, Artificial Sequence
  Description of Artificial Sequence: Synthetic Construct
atgtgccaccaacagctcgtgatcagctggttctccctggtgttcctggctagccccctggtggccatctgggagctcaagaaagacgtgtacgtggtggaactggactggtaccccgacgcccctggcgaaatggtggtgctgacatgcgacacccctgaggaggatggcattacctggaccctcgatcagagctccgaggtgctgggcagcggcaaaaccctgaccatccaggtgaaggagtttggcgatgccggccagtacacatgtcacaagggcggcgaggtgctgagccactccctgctgctgctccacaagaaggaagatggcatctggagcaccgacattctgaaggatcagaaggagcccaagaacaagacattcctgaggtgtgaggccaagaactacagcggcaggtttacctgctggtggctgacaacaatcagcaccgacctcacattctccgtcaagtcctccaggggttcttccgaccctcaaggcgtgacatgcggcgctgccaccctgagcgctgagagagtcaggggcgacaacaaggagtacgagtacagcgtcgaatgtcaggaggacagcgcctgtcccgccgctgaagagagcctgcctatcgaggtgatggtggacgccgtgcacaaactgaagtatgagaattacacctccagcttcttcatcagggacatcatcaaacccgatccccccaagaacctgcagctgaagcctctgaagaacagcagacaggtcgaagtgtcctgggagtaccctgatacctggtccacaccccacagctacttcagcctgaccttttgcgtgcaggtgcagggcaagagcaaaagggagaagaaggacagggtgtttaccgacaagacctccgccacagtgatttgcagaaagaacgcctccatcagcgtgagggcccaggacaggtattacagcagctcctggagcgaatgggctagcgtgccctgtagcggaggaggaggcagcggaggaggaggttctggaggaggcggcagcagaaacctgcctgtcgctacccccgaccccggaatgttcccctgcctgcaccactcccagaacctcctgagggccgtgtccaacatgctgcagaaggctagacagaccctcgaattctacccctgtaccagcgaggagatcgaccatgaggacatcaccaaggataagaccagcaccgtggaggcttgcctgcctctggagctgaccaaaaacgagagctgcctgaacagcagggaaaccagcttcattaccaacggctcctgcctggcctccaggaagacatccttcatgatggccctgtgcctcagcagcatctacgaggacctgaagatgtatcaggtggagtttaagaccatgaatgccaagctgctgatggaccctaagaggcagatcttcctggaccagaatatgctggccgtgattgacgagctgatgcaggccctcaactttaacagcgagaccgtgccccagaaaagcagcctcgaagagcctgacttctacaaaaccaagattaagctgtgtatcctgctgcacgccttcaggatcagggccgtgaccatcgacagggtgatgagctacctgaacgccagcggatcctcactggcgctcagccttactgccgaccaaatggtatcagctcttctggacgcagaacccccaattctttattccgagtacgaccccacacgcccgttcagtgaagcttccatgatgggcctccttacgaaccttgccgaccgggaactcgtgcacatgatcaattgggcgaagcgggtgccggggttcgtagatttgacacttcacgaccaagttcatctcttggaatgtgcttggatggagatattgatgatcggactcgtgtggaggtcaatggagcatcctggtaaacttcttttcgcacccaatctgctcttggatagagagcagggtaagtgcgtcgagggtggcgttgaaatcttcgacatgctccttgcgacatccagccgattccgaatgatgaatcttcaaggagaggaatttgtctgtcttaagagcattatactcctcaatagtggagtttacaccttcttgtcctctacactgaaatcacttgaggaaaaagatcacatacatagggtgttggataaaatcacggatacactcatacatctgatggcaaaagcaggattgaccctgcaacagcagcaccaacgactggcccaactgctgttgatccttagccatatcagacacatgtctaacaaaaggatggaacatttgtacagcatgaaatgtaagaacgtagtgccactgtccgatttgttgctggaaatgctggacgctcatcggctctga

SEQ ID NO: 200 - protein, 787 aa, Artificial Sequence
  Description of Artificial Sequence: Synthetic Construct
MCHQQLVISWFSLVFLASPLVAIWELKKDVYVVELDWYPDAPGEMVVLTCDTPEEDGITWTLDQSSEVLGSGKTLTIQVKEFGDAGQYTCHKGGEVLSHSLLLLHKKEDGIWSTDILKDQKEPKNKTFLRCEAKNYSGRFTCWWLTTISTDLTFSVKSSRGSSDPQGVTCGAATLSAERVRGDNKEYEYSVECQEDSACPAAEESLPIEVMVDAVHKLKYENYTSSFFIRDIIKPDPPKNLQLKPLKNSRQVEVSWEYPDTWSTPHSYFSLTFCVQVQGKSKREKKDRVFTDKTSATVICRKNASISVRAQDRYYSSSWSEWASVPCSGGGGSGGGGSGGGGSRNLPVATPDPGMFPCLHHSQNLLRAVSNMLQKARQTLEFYPCTSEEIDHEDITKDKTSTVEACLPLELTKNESCLNSRETSFITNGSCLASRKTSFMMALCLSSIYEDLKMYQVEFKTMNAKLLMDPKRQIFLDQNMLAVIDELMQALNFNSETVPQKSSLEEPDFYKTKIKLCILLHAFRIRAVTIDRVMSYLNASGSSLALSLTADQMVSALLDAEPPILYSEYDPTRPFSEASMMGLLTNLADRELVHMINWAKRVPGFVDLTLHDQVHLLECAWMEILMIGLVWRSMEHPGKLLFAPNLLLDRGQGKCVEGGVEIFDMLLATSSRFRMMNLQGEEFVCLKSIILLNSGVYTFLSSTLKSLEEKDHIHRVLDKITDTLIHLMAKAGLTLQQQHQRLAQLLLILSHIRHMSNKRMEHLYSMKCKNVVPLSDLLLEMLDAHRL

SEQ ID NO: 201 - DNA, 2364 bp, Artificial Sequence
  Description of Artificial Sequence: Synthetic Construct
atgtgccaccaacagctcgtgatcagctggttctccctggtgttcctggctagccccctggtggccatctgggagctcaagaaagacgtgtacgtggtggaactggactggtaccccgacgcccctggcgaaatggtggtgctgacatgcgacacccctgaggaggatggcattacctggaccctcgatcagagctccgaggtgctgggcagcggcaaaaccctgaccatccaggtgaaggagtttggcgatgccggccagtacacatgtcacaagggcggcgaggtgctgagccactccctgctgctgctccacaagaaggaagatggcatctggagcaccgacattctgaaggatcagaaggagcccaagaacaagacattcctgaggtgtgaggccaagaactacagcggcaggtttacctgctggtggctgacaacaatcagcaccgacctcacattctccgtcaagtcctccaggggttcttccgaccctcaaggcgtgacatgcggcgctgccaccctgagcgctgagagagtcaggggcgacaacaaggagtacgagtacagcgtcgaatgtcaggaggacagcgcctgtcccgccgctgaagagagcctgcctatcgaggtgatggtggacgccgtgcacaaactgaagtatgagaattacacctccagcttcttcatcagggacatcatcaaacccgatccccccaagaacctgcagctgaagcctctgaagaacagcagacaggtcgaagtgtcctgggagtaccctgatacctggtccacaccccacagctacttcagcctgaccttttgcgtgcaggtgcagggcaagagcaaaagggagaagaaggacagggtgtttaccgacaagacctccgccacagtgatttgcagaaagaacgcctccatcagcgtgagggcccaggacaggtattacagcagctcctggagcgaatgggctagcgtgccctgtagcggaggaggaggcagcggaggaggaggttctggaggaggcggcagcagaaacctgcctgtcgctacccccgaccccggaatgttcccctgcctgcaccactcccagaacctcctgagggccgtgtccaacatgctgcagaaggctagacagaccctcgaattctacccctgtaccagcgaggagatcgaccatgaggacatcaccaaggataagaccagcaccgtggaggcttgcctgcctctggagctgaccaaaaacgagagctgcctgaacagcagggaaaccagcttcattaccaacggctcctgcctggcctccaggaagacatccttcatgatggccctgtgcctcagcagcatctacgaggacctgaagatgtatcaggtggagtttaagaccatgaatgccaagctgctgatggaccctaagaggcagatcttcctggaccagaatatgctggccgtgattgacgagctgatgcaggccctcaactttaacagcgagaccgtgccccagaaaagcagcctcgaagagcctgacttctacaaaaccaagattaagctgtgtatcctgctgcacgccttcaggatcagggccgtgaccatcgacagggtgatgagctacctgaacgccagcggatcctcactggcgctcagccttactgccgaccaaatggtatcagctcttctggacgcagaacccccaattctttattccgagtacgaccccacacgcccgttcagtgaagcttccatgatgggcctccttacgaaccttgccgaccgggaactcgtgcacatgatcaattgggcgaagcgggtgccggggttcgtagatttgacacttcacgaccaagttcatctcttggaatgtgcttggatggagatattgatgatcggactcgtgtggaggtcaatggagcatcctggtaaacttcttttcgcacccaatctgctcttggatagaggccagggtaagtgcgtcgagggtggcgttgaaatcttcgacatgctccttgcgacatccagccgattccgaatgatgaatcttcaaggagaggaatttgtctgtcttaagagcattatactcctcaatagtggagtttacaccttcttgtcctctacactgaaatcacttgaggaaaaagatcacatacatagggtgttggataaaatcacggatacactcatacatctgatggcaaaagcaggattgaccctgcaacagcagcaccaacgactggcccaactgctgttgatccttagccatatcagacacatgtctaacaaaaggatggaacatttgtacagcatgaaatgtaagaacgtagtgccactgtccgatttgttgctggaaatgctggacgctcatcggctctga

SEQ ID NO: 202 - protein, 787 aa, Artificial Sequence
  Description of Artificial Sequence: Synthetic Construct
MCHQQLVISWFSLVFLASPLVAIWELKKDVYVVELDWYPDAPGEMVVLTCDTPEEDGITWTLDQSSEVLGSGKTLTIQVKEFGDAGQYTCHKGGEVLSHSLLLLHKKEDGIWSTDILKDQKEPKNKTFLRCEAKNYSGRFTCWWLTTISTDLTFSVKSSRGSSDPQGVTCGAATLSAERVRGDNKEYEYSVECQEDSACPAAEESLPIEVMVDAVHKLKYENYTSSFFIRDIIKPDPPKNLQLKPLKNSRQVEVSWEYPDTWSTPHSYFSLTFCVQVQGKSKREKKDRVFTDKTSATVICRKNASISVRAQDRYYSSSWSEWASVPCSGGGGSGGGGSGGGGSRNLPVATPDPGMFPCLHHSQNLLRAVSNMLQKARQTLEFYPCTSEEIDHEDITKDKTSTVEACLPLELTKNESCLNSRETSFITNGSCLASRKTSFMMALCLSSIYEDLKMYQVEFKTMNAKLLMDPKRQIFLDQNMLAVIDELMQALNFNSETVPQKSSLEEPDFYKTKIKLCILLHAFRIRAVTIDRVMSYLNASGSSLALSLTADQMVSALLDAEPPILYSEYDPTRPFSEASMMGLLTNLADRELVHMINWAKRVPGFVDLTLHDQVHLLECAWMEILMIGLVWRSMEHPGKLLFAPNLLLDRNQGKCVEGGVEIFDMLLATSSRFRMMNLQGEEFVCLKSIILLNSGVYTFLSSTLKSLEEKDHIHRVLDKITDTLIHLMAKAGLTLQQQHFRLAQLLLILSHIRHMSNKRMEHLYSMKCKNVVPLSDLLLEMLDAHRL

SEQ ID NO: 203 - DNA, 2364 bp, Artificial Sequence
  Description of Artificial Sequence: Synthetic Construct
atgtgccaccaacagctcgtgatcagctggttctccctggtgttcctggctagccccctggtggccatctgggagctcaagaaagacgtgtacgtggtggaactggactggtaccccgacgcccctggcgaaatggtggtgctgacatgcgacacccctgaggaggatggcattacctggaccctcgatcagagctccgaggtgctgggcagcggcaaaaccctgaccatccaggtgaaggagtttggcgatgccggccagtacacatgtcacaagggcggcgaggtgctgagccactccctgctgctgctccacaagaaggaagatggcatctggagcaccgacattctgaaggatcagaaggagcccaagaacaagacattcctgaggtgtgaggccaagaactacagcggcaggtttacctgctggtggctgacaacaatcagcaccgacctcacattctccgtcaagtcctccaggggttcttccgaccctcaaggcgtgacatgcggcgctgccaccctgagcgctgagagagtcaggggcgacaacaaggagtacgagtacagcgtcgaatgtcaggaggacagcgcctgtcccgccgctgaagagagcctgcctatcgaggtgatggtggacgccgtgcacaaactgaagtatgagaattacacctccagcttcttcatcagggacatcatcaaacccgatccccccaagaacctgcagctgaagcctctgaagaacagcagacaggtcgaagtgtcctgggagtaccctgatacctggtccacaccccacagctacttcagcctgaccttttgcgtgcaggtgcagggcaagagcaaaagggagaagaaggacagggtgtttaccgacaagacctccgccacagtgatttgcagaaagaacgcctccatcagcgtgagggcccaggacaggtattacagcagctcctggagcgaatgggctagcgtgccctgtagcggaggaggaggcagcggaggaggaggttctggaggaggcggcagcagaaacctgcctgtcgctacccccgaccccggaatgttcccctgcctgcaccactcccagaacctcctgagggccgtgtccaacatgctgcagaaggctagacagaccctcgaattctacccctgtaccagcgaggagatcgaccatgaggacatcaccaaggataagaccagcaccgtggaggcttgcctgcctctggagctgaccaaaaacgagagctgcctgaacagcagggaaaccagcttcattaccaacggctcctgcctggcctccaggaagacatccttcatgatggccctgtgcctcagcagcatctacgaggacctgaagatgtatcaggtggagtttaagaccatgaatgccaagctgctgatggaccctaagaggcagatcttcctggaccagaatatgctggccgtgattgacgagctgatgcaggccctcaactttaacagcgagaccgtgccccagaaaagcagcctcgaagagcctgacttctacaaaaccaagattaagctgtgtatcctgctgcacgccttcaggatcagggccgtgaccatcgacagggtgatgagctacctgaacgccagcggatcctcactggcgctcagccttactgccgaccaaatggtatcagctcttctggacgcagaacccccaattctttattccgagtacgaccccacacgcccgttcagtgaagcttccatgatgggcctccttacgaaccttgccgaccgggaactcgtgcacatgatcaattgggcgaagcgggtgccggggttcgtagatttgacacttcacgaccaagttcatctcttggaatgtgcttggatggagatattgatgatcggactcgtgtggaggtcaatggagcatcctggtaaacttcttttcgcacccaatctgctcttggatagaaatcagggtaagtgcgtcgagggtggcgttgaaatcttcgacatgctccttgcgacatccagccgattccgaatgatgaatcttcaaggagaggaatttgtctgtcttaagagcattatactcctcaatagtggagtttacaccttcttgtcctctacactgaaatcacttgaggaaaaagatcacatacatagggtgttggataaaatcacggatacactcatacatctgatggcaaaagcaggattgaccctgcaacagcagcacttccgactggcccaactgctgttgatccttagccatatcagacacatgtctaacaaaaggatggaacatttgtacagcatgaaatgtaagaacgtagtgccactgtccgatttgttgctggaaatgctggacgctcatcggctctga

SEQ ID NO: 204 - protein, 787 aa, Artificial Sequence
  Description of Artificial Sequence: Synthetic Construct
MCHQQLVISWFSLVFLASPLVAIWELKKDVYVVELDWYPDAPGEMVVLTCDTPEEDGITWTLDQSSEVLGSGKTLTIQVKEFGDAGQYTCHKGGEVLSHSLLLLHKKEDGIWSTDILKDQKEPKNKTFLRCEAKNYSGRFTCWWLTTISTDLTFSVKSSRGSSDPQGVTCGAATLSAERVRGDNKEYEYSVECQEDSACPAAEESLPIEVMVDAVHKLKYENYTSSFFIRDIIKPDPPKNLQLKPLKNSRQVEVSWEYPDTWSTPHSYFSLTFCVQVQGKSKREKKDRVFTDKTSATVICRKNASISVRAQDRYYSSSWSEWASVPCSGGGGSGGGGSGGGGSRNLPVATPDPGMFPCLHHSQNLLRAVSNMLQKARQTLEFYPCTSEEIDHEDITKDKTSTVEACLPLELTKNESCLNSRETSFITNGSCLASRKTSFMMALCLSSIYEDLKMYQVEFKTMNAKLLMDPKRQIFLDQNMLAVIDELMQALNFNSETVPQKSSLEEPDFYKTKIKLCILLHAFRIRAVTIDRVMSYLNASGSSLALSLTADQMVSALLDAEPPILYSEYDPTRPFSEASMMGLLTNLADRELVHMINWAKRVPGFVDLTLHDQVHLLECAWMEILMIGLVWRSMEHPGKLLFAPNLLLDRNQGKCVEGGVEIFDMLLATSSRFRMMNLQGEEFVCLKSIILLNSGVYTFLSSTLKSLEEKDHIHRVLDKITDTLIHLMAKAGLTLQQQHLRLAQLLLILSHIRHMSNKRMEHLYSMKCKNVVPLSDLLLEMLDAHRL

SEQ ID NO: 205 - DNA, 2364 bp, Artificial Sequence
  Description of Artificial Sequence: Synthetic Construct
atgtgccaccaacagctcgtgatcagctggttctccctggtgttcctggctagccccctggtggccatctgggagctcaagaaagacgtgtacgtggtggaactggactggtaccccgacgcccctggcgaaatggtggtgctgacatgcgacacccctgaggaggatggcattacctggaccctcgatcagagctccgaggtgctgggcagcggcaaaaccctgaccatccaggtgaaggagtttggcgatgccggccagtacacatgtcacaagggcggcgaggtgctgagccactccctgctgctgctccacaagaaggaagatggcatctggagcaccgacattctgaaggatcagaaggagcccaagaacaagacattcctgaggtgtgaggccaagaactacagcggcaggtttacctgctggtggctgacaacaatcagcaccgacctcacattctccgtcaagtcctccaggggttcttccgaccctcaaggcgtgacatgcggcgctgccaccctgagcgctgagagagtcaggggcgacaacaaggagtacgagtacagcgtcgaatgtcaggaggacagcgcctgtcccgccgctgaagagagcctgcctatcgaggtgatggtggacgccgtgcacaaactgaagtatgagaattacacctccagcttcttcatcagggacatcatcaaacccgatccccccaagaacctgcagctgaagcctctgaagaacagcagacaggtcgaagtgtcctgggagtaccctgatacctggtccacaccccacagctacttcagcctgaccttttgcgtgcaggtgcagggcaagagcaaaagggagaagaaggacagggtgtttaccgacaagacctccgccacagtgatttgcagaaagaacgcctccatcagcgtgagggcccaggacaggtattacagcagctcctggagcgaatgggctagcgtgccctgtagcggaggaggaggcagcggaggaggaggttctggaggaggcggcagcagaaacctgcctgtcgctacccccgaccccggaatgttcccctgcctgcaccactcccagaacctcctgagggccgtgtccaacatgctgcagaaggctagacagaccctcgaattctacccctgtaccagcgaggagatcgaccatgaggacatcaccaaggataagaccagcaccgtggaggcttgcctgcctctggagctgaccaaaaacgagagctgcctgaacagcagggaaaccagcttcattaccaacggctcctgcctggcctccaggaagacatccttcatgatggccctgtgcctcagcagcatctacgaggacctgaagatgtatcaggtggagtttaagaccatgaatgccaagctgctgatggaccctaagaggcagatcttcctggaccagaatatgctggccgtgattgacgagctgatgcaggccctcaactttaacagcgagaccgtgccccagaaaagcagcctcgaagagcctgacttctacaaaaccaagattaagctgtgtatcctgctgcacgccttcaggatcagggccgtgaccatcgacagggtgatgagctacctgaacgccagcggatcctcactggcgctcagccttactgccgaccaaatggtatcagctcttctggacgcagaacccccaattctttattccgagtacgaccccacacgcccgttcagtgaagcttccatgatgggcctccttacgaaccttgccgaccgggaactcgtgcacatgatcaattgggcgaagcgggtgccggggttcgtagatttgacacttcacgaccaagttcatctcttggaatgtgcttggatggagatattgatgatcggactcgtgtggaggtcaatggagcatcctggtaaacttcttttcgcacccaatctgctcttggatagaaatcagggtaagtgcgtcgagggtggcgttgaaatcttcgacatgctccttgcgacatccagccgattccgaatgatgaatcttcaaggagaggaatttgtctgtcttaagagcattatactcctcaatagtggagtttacaccttcttgtcctctacactgaaatcacttgaggaaaaagatcacatacatagggtgttggataaaatcacggatacactcatacatctgatggcaaaagcaggattgaccctgcaacagcagcacctgcgactggcccaactgctgttgatccttagccatatcagacacatgtctaacaaaaggatggaacatttgtacagcatgaaatgtaagaacgtagtgccactgtccgatttgttgctggaaatgctggacgctcatcggctctga

SEQ ID NO: 206 - protein, 787 aa, Artificial Sequence
  Description of Artificial Sequence: Synthetic Construct
MCHQQLVISWFSLVFLASPLVAIWELKKDVYVVELDWYPDAPGEMVVLTCDTPEEDGITWTLDQSSEVLGSGKTLTIQVKEFGDAGQYTCHKGGEVLSHSLLLLHKKEDGIWSTDILKDQKEPKNKTFLRCEAKNYSGRFTCWWLTTISTDLTFSVKSSRGSSDPQGVTCGAATLSAERVRGDNKEYEYSVECQEDSACPAAEESLPIEVMVDAVHKLKYENYTSSFFIRDIIKPDPPKNLQLKPLKNSRQVEVSWEYPDTWSTPHSYFSLTFCVQVQGKSKREKKDRVFTDKTSATVICRKNASISVRAQDRYYSSSWSEWASVPCSGGGGSGGGGSGGGGSRNLPVATPDPGMFPCLHHSQNLLRAVSNMLQKARQTLEFYPCTSEEIDHEDITKDKTSTVEACLPLELTKNESCLNSRETSFITNGSCLASRKTSFMMALCLSSIYEDLKMYQVEFKTMNAKLLMDPKRQIFLDQNMLAVIDELMQALNFNSETVPQKSSLEEPDFYKTKIKLCILLHAFRIRAVTIDRVMSYLNASGSSLALSLTADQMVSALLDAEPPILYSEYDPTRPFSEASMMGLLTNLADRELVHMINWAKRVPGFVDLTLHDQVHLLECAWMEILMIGLVWRSMEHPGKLLFAPNLLLDRNQGKCVEGGVEIFDMLLATSSRFRMMNLQGEEFVCLKSIILLNSGVYTFLSSTLKSLEEKDHIHRVLDKITDTLIHLMAKAGLTLQQQHYRLAQLLLILSHIRHMSNKRMEHLYSMKCKNVVPLSDLLLEMLDAHRL

SEQ ID NO: 207 - DNA, 2364 bp, Artificial Sequence
  Description of Artificial Sequence: Synthetic Construct
atgtgccaccaacagctcgtgatcagctggttctccctggtgttcctggctagccccctggtggccatctgggagctcaagaaagacgtgtacgtggtggaactggactggtaccccgacgcccctggcgaaatggtggtgctgacatgcgacacccctgaggaggatggcattacctggaccctcgatcagagctccgaggtgctgggcagcggcaaaaccctgaccatccaggtgaaggagtttggcgatgccggccagtacacatgtcacaagggcggcgaggtgctgagccactccctgctgctgctccacaagaaggaagatggcatctggagcaccgacattctgaaggatcagaaggagcccaagaacaagacattcctgaggtgtgaggccaagaactacagcggcaggtttacctgctggtggctgacaacaatcagcaccgacctcacattctccgtcaagtcctccaggggttcttccgaccctcaaggcgtgacatgcggcgctgccaccctgagcgctgagagagtcaggggcgacaacaaggagtacgagtacagcgtcgaatgtcaggaggacagcgcctgtcccgccgctgaagagagcctgcctatcgaggtgatggtggacgccgtgcacaaactgaagtatgagaattacacctccagcttcttcatcagggacatcatcaaacccgatccccccaagaacctgcagctgaagcctctgaagaacagcagacaggtcgaagtgtcctgggagtaccctgatacctggtccacaccccacagctacttcagcctgaccttttgcgtgcaggtgcagggcaagagcaaaagggagaagaaggacagggtgtttaccgacaagacctccgccacagtgatttgcagaaagaacgcctccatcagcgtgagggcccaggacaggtattacagcagctcctggagcgaatgggctagcgtgccctgtagcggaggaggaggcagcggaggaggaggttctggaggaggcggcagcagaaacctgcctgtcgctacccccgaccccggaatgttcccctgcctgcaccactcccagaacctcctgagggccgtgtccaacatgctgcagaaggctagacagaccctcgaattctacccctgtaccagcgaggagatcgaccatgaggacatcaccaaggataagaccagcaccgtggaggcttgcctgcctctggagctgaccaaaaacgagagctgcctgaacagcagggaaaccagcttcattaccaacggctcctgcctggcctccaggaagacatccttcatgatggccctgtgcctcagcagcatctacgaggacctgaagatgtatcaggtggagtttaagaccatgaatgccaagctgctgatggaccctaagaggcagatcttcctggaccagaatatgctggccgtgattgacgagctgatgcaggccctcaactttaacagcgagaccgtgccccagaaaagcagcctcgaagagcctgacttctacaaaaccaagattaagctgtgtatcctgctgcacgccttcaggatcagggccgtgaccatcgacagggtgatgagctacctgaacgccagcggatcctcactggcgctcagccttactgccgaccaaatggtatcagctcttctggacgcagaacccccaattctttattccgagtacgaccccacacgcccgttcagtgaagcttccatgatgggcctccttacgaaccttgccgaccgggaactcgtgcacatgatcaattgggcgaagcgggtgccggggttcgtagatttgacacttcacgaccaagttcatctcttggaatgtgcttggatggagatattgatgatcggactcgtgtggaggtcaatggagcatcctggtaaacttcttttcgcacccaatctgctcttggatagaaatcagggtaagtgcgtcgagggtggcgttgaaatcttcgacatgctccttgcgacatccagccgattccgaatgatgaatcttcaaggagaggaatttgtctgtcttaagagcattatactcctcaatagtggagtttacaccttcttgtcctctacactgaaatcacttgaggaaaaagatcacatacatagggtgttggataaaatcacggatacactcatacatctgatggcaaaagcaggattgaccctgcaacagcagcactaccgactggcccaactgctgttgatccttagccatatcagacacatgtctaacaaaaggatggaacatttgtacagcatgaaatgtaagaacgtagtgccactgtccgatttgttgctggaaatgctggacgctcatcggctctga

SEQ ID NO: 208 - protein, 787 aa, Artificial Sequence
  Description of Artificial Sequence: Synthetic Construct
MCHQQLVISWFSLVFLASPLVAIWELKKDVYVVELDWYPDAPGEMVVLTCDTPEEDGITWTLDQSSEVLGSGKTLTIQVKEFGDAGQYTCHKGGEVLSHSLLLLHKKEDGIWSTDILKDQKEPKNKTFLRCEAKNYSGRFTCWWLTTISTDLTFSVKSSRGSSDPQGVTCGAATLSAERVRGDNKEYEYSVECQEDSACPAAEESLPIEVMVDAVHKLKYENYTSSFFIRDIIKPDPPKNLQLKPLKNSRQVEVSWEYPDTWSTPHSYFSLTFCVQVQGKSKREKKDRVFTDKTSATVICRKNASISVRAQDRYYSSSWSEWASVPCSGGGGSGGGGSGGGGSRNLPVATPDPGMFPCLHHSQNLLRAVSNMLQKARQTLEFYPCTSEEIDHEDITKDKTSTVEACLPLELTKNESCLNSRETSFITNGSCLASRKTSFMMALCLSSIYEDLKMYQVEFKTMNAKLLMDPKRQIFLDQNMLAVIDELMQALNFNSETVPQKSSLEEPDFYKTKIKLCILLHAFRIRAVTIDRVMSYLNASGSSLALSLTADQMVSALLDAEPPILYSEYDPTRPFSEASMMGLLTNLADRELVHMINWAKRVPGFVDLTLHDQVHLLECAWMEILMIGLVWRSMEHPGKLLFAPNLLLDRNQGKCVEGGVEIFDMLLATSSRFRMMNLQGEEFVCLKSIILLNSGVYTFLSSTLKSLEEKDHIHRVLDKITDTLIHLMAKAGLTLQQQHHRLAQLLLILSHIRHMSNKRMEHLYSMKCKNVVPLSDLLLEMLDAHRL

SEQ ID NO: 209 - DNA, 2364 bp, Artificial Sequence
  Description of Artificial Sequence: Synthetic Construct
atgtgccaccaacagctcgtgatcagctggttctccctggtgttcctggctagccccctggtggccatctgggagctcaagaaagacgtgtacgtggtggaactggactggtaccccgacgcccctggcgaaatggtggtgctgacatgcgacacccctgaggaggatggcattacctggaccctcgatcagagctccgaggtgctgggcagcggcaaaaccctgaccatccaggtgaaggagtttggcgatgccggccagtacacatgtcacaagggcggcgaggtgctgagccactccctgctgctgctccacaagaaggaagatggcatctggagcaccgacattctgaaggatcagaaggagcccaagaacaagacattcctgaggtgtgaggccaagaactacagcggcaggtttacctgctggtggctgacaacaatcagcaccgacctcacattctccgtcaagtcctccaggggttcttccgaccctcaaggcgtgacatgcggcgctgccaccctgagcgctgagagagtcaggggcgacaacaaggagtacgagtacagcgtcgaatgtcaggaggacagcgcctgtcccgccgctgaagagagcctgcctatcgaggtgatggtggacgccgtgcacaaactgaagtatgagaattacacctccagcttcttcatcagggacatcatcaaacccgatccccccaagaacctgcagctgaagcctctgaagaacagcagacaggtcgaagtgtcctgggagtaccctgatacctggtccacaccccacagctacttcagcctgaccttttgcgtgcaggtgcagggcaagagcaaaagggagaagaaggacagggtgtttaccgacaagacctccgccacagtgatttgcagaaagaacgcctccatcagcgtgagggcccaggacaggtattacagcagctcctggagcgaatgggctagcgtgccctgtagcggaggaggaggcagcggaggaggaggttctggaggaggcggcagcagaaacctgcctgtcgctacccccgaccccggaatgttcccctgcctgcaccactcccagaacctcctgagggccgtgtccaacatgctgcagaaggctagacagaccctcgaattctacccctgtaccagcgaggagatcgaccatgaggacatcaccaaggataagaccagcaccgtggaggcttgcctgcctctggagctgaccaaaaacgagagctgcctgaacagcagggaaaccagcttcattaccaacggctcctgcctggcctccaggaagacatccttcatgatggccctgtgcctcagcagcatctacgaggacctgaagatgtatcaggtggagtttaagaccatgaatgccaagctgctgatggaccctaagaggcagatcttcctggaccagaatatgctggccgtgattgacgagctgatgcaggccctcaactttaacagcgagaccgtgccccagaaaagcagcctcgaagagcctgacttctacaaaaccaagattaagctgtgtatcctgctgcacgccttcaggatcagggccgtgaccatcgacagggtgatgagctacctgaacgccagcggatcctcactggcgctcagccttactgccgaccaaatggtatcagctcttctggacgcagaacccccaattctttattccgagtacgaccccacacgcccgttcagtgaagcttccatgatgggcctccttacgaaccttgccgaccgggaactcgtgcacatgatcaattgggcgaagcgggtgccggggttcgtagatttgacacttcacgaccaagttcatctcttggaatgtgcttggatggagatattgatgatcggactcgtgtggaggtcaatggagcatcctggtaaacttcttttcgcacccaatctgctcttggatagaaatcagggtaagtgcgtcgagggtggcgttgaaatcttcgacatgctccttgcgacatccagccgattccgaatgatgaatcttcaaggagaggaatttgtctgtcttaagagcattatactcctcaatagtggagtttacaccttcttgtcctctacactgaaatcacttgaggaaaaagatcacatacatagggtgttggataaaatcacggatacactcatacatctgatggcaaaagcaggattgaccctgcaacagcagcaccaccgactggcccaactgctgttgatccttagccatatcagacacatgtctaacaaaaggatggaacatttgtacagcatgaaatgtaagaacgtagtgccactgtccgatttgttgctggaaatgctggacgctcatcggctctga

SEQ ID NO: 210 - protein, 787 aa, Artificial Sequence
  Description of Artificial Sequence: Synthetic Construct
MCHQQLVISWFSLVFLASPLVAIWELKKDVYVVELDWYPDAPGEMVVLTCDTPEEDGITWTLDQSSEVLGSGKTLTIQVKEFGDAGQYTCHKGGEVLSHSLLLLHKKEDGIWSTDILKDQKEPKNKTFLRCEAKNYSGRFTCWWLTTISTDLTFSVKSSRGSSDPQGVTCGAATLSAERVRGDNKEYEYSVECQEDSACPAAEESLPIEVMVDAVHKLKYENYTSSFFIRDIIKPDPPKNLQLKPLKNSRQVEVSWEYPDTWSTPHSYFSLTFCVQVQGKSKREKKDRVFTDKTSATVICRKNASISVRAQDRYYSSSWSEWASVPCSGGGGSGGGGSGGGGSRNLPVATPDPGMFPCLHHSQNLLRAVSNMLQKARQTLEFYPCTSEEIDHEDITKDKTSTVEACLPLELTKNESCLNSRETSFITNGSCLASRKTSFMMALCLSSIYEDLKMYQVEFKTMNAKLLMDPKRQIFLDQNMLAVIDELMQALNFNSETVPQKSSLEEPDFYKTKIKLCILLHAFRIRAVTIDRVMSYLNASGSSLALSLTADQMVSALLDAEPPILYSEYDPTRPFSEASMMGLLTNLADRELVHMINWAKRVPGFVDLTLHDQVHLLECAWMEILMIGLVWRSMEHPGKLLFAPNLLLDRNQGKCVEGGVEIFDMLLATSSRFRMMNLQGEEFVCLKSIILLNSGVYTFLSSTLKSLEEKDHIHRVLDKITDTLIHLMAKAGLTLQQQHIRLAQLLLILSHIRHMSNKRMEHLYSMKCKNVVPLSDLLLEMLDAHRL

SEQ ID NO: 211 - DNA, 2364 bp, Artificial Sequence
  Description of Artificial Sequence: Synthetic Construct
atgtgccaccaacagctcgtgatcagctggttctccctggtgttcctggctagccccctggtggccatctgggagctcaagaaagacgtgtacgtggtggaactggactggtaccccgacgcccctggcgaaatggtggtgctgacatgcgacacccctgaggaggatggcattacctggaccctcgatcagagctccgaggtgctgggcagcggcaaaaccctgaccatccaggtgaaggagtttggcgatgccggccagtacacatgtcacaagggcggcgaggtgctgagccactccctgctgctgctccacaagaaggaagatggcatctggagcaccgacattctgaaggatcagaaggagcccaagaacaagacattcctgaggtgtgaggccaagaactacagcggcaggtttacctgctggtggctgacaacaatcagcaccgacctcacattctccgtcaagtcctccaggggttcttccgaccctcaaggcgtgacatgcggcgctgccaccctgagcgctgagagagtcaggggcgacaacaaggagtacgagtacagcgtcgaatgtcaggaggacagcgcctgtcccgccgctgaagagagcctgcctatcgaggtgatggtggacgccgtgcacaaactgaagtatgagaattacacctccagcttcttcatcagggacatcatcaaacccgatccccccaagaacctgcagctgaagcctctgaagaacagcagacaggtcgaagtgtcctgggagtaccctgatacctggtccacaccccacagctacttcagcctgaccttttgcgtgcaggtgcagggcaagagcaaaagggagaagaaggacagggtgtttaccgacaagacctccgccacagtgatttgcagaaagaacgcctccatcagcgtgagggcccaggacaggtattacagcagctcctggagcgaatgggctagcgtgccctgtagcggaggaggaggcagcggaggaggaggttctggaggaggcggcagcagaaacctgcctgtcgctacccccgaccccggaatgttcccctgcctgcaccactcccagaacctcctgagggccgtgtccaacatgctgcagaaggctagacagaccctcgaattctacccctgtaccagcgaggagatcgaccatgaggacatcaccaaggataagaccagcaccgtggaggcttgcctgcctctggagctgaccaaaaacgagagctgcctgaacagcagggaaaccagcttcattaccaacggctcctgcctggcctccaggaagacatccttcatgatggccctgtgcctcagcagcatctacgaggacctgaagatgtatcaggtggagtttaagaccatgaatgccaagctgctgatggaccctaagaggcagatcttcctggaccagaatatgctggccgtgattgacgagctgatgcaggccctcaactttaacagcgagaccgtgccccagaaaagcagcctcgaagagcctgacttctacaaaaccaagattaagctgtgtatcctgctgcacgccttcaggatcagggccgtgaccatcgacagggtgatgagctacctgaacgccagcggatcctcactggcgctcagccttactgccgaccaaatggtatcagctcttctggacgcagaacccccaattctttattccgagtacgaccccacacgcccgttcagtgaagcttccatgatgggcctccttacgaaccttgccgaccgggaactcgtgcacatgatcaattgggcgaagcgggtgccggggttcgtagatttgacacttcacgaccaagttcatctcttggaatgtgcttggatggagatattgatgatcggactcgtgtggaggtcaatggagcatcctggtaaacttcttttcgcacccaatctgctcttggatagaaatcagggtaagtgcgtcgagggtggcgttgaaatcttcgacatgctccttgcgacatccagccgattccgaatgatgaatcttcaaggagaggaatttgtctgtcttaagagcattatactcctcaatagtggagtttacaccttcttgtcctctacactgaaatcacttgaggaaaaagatcacatacatagggtgttggataaaatcacggatacactcatacatctgatggcaaaagcaggattgaccctgcaacagcagcacatccgactggcccaactgctgttgatccttagccatatcagacacatgtctaacaaaaggatggaacatttgtacagcatgaaatgtaagaacgtagtgccactgtccgatttgttgctggaaatgctggacgctcatcggctctga

SEQ ID NO: 212 - protein, 787 aa, Artificial Sequence
  Description of Artificial Sequence: Synthetic Construct
MCHQQLVISWFSLVFLASPLVAIWELKKDVYVVELDWYPDAPGEMVVLTCDTPEEDGITWTLDQSSEVLGSGKTLTIQVKEFGDAGQYTCHKGGEVLSHSLLLLHKKEDGIWSTDILKDQKEPKNKTFLRCEAKNYSGRFTCWWLTTISTDLTFSVKSSRGSSDPQGVTCGAATLSAERVRGDNKEYEYSVECQEDSACPAAEESLPIEVMVDAVHKLKYENYTSSFFIRDIIKPDPPKNLQLKPLKNSRQVEVSWEYPDTWSTPHSYFSLTFCVQVQGKSKREKKDRVFTDKTSATVICRKNASISVRAQDRYYSSSWSEWASVPCSGGGGSGGGGSGGGGSRNLPVATPDPGMFPCLHHSQNLLRAVSNMLQKARQTLEFYPCTSEEIDHEDITKDKTSTVEACLPLELTKNESCLNSRETSFITNGSCLASRKTSFMMALCLSSIYEDLKMYQVEFKTMNAKLLMDPKRQIFLDQNMLAVIDELMQALNFNSETVPQKSSLEEPDFYKTKIKLCILLHAFRIRAVTIDRVMSYLNASGSSLALSLTADQMVSALLDAEPPILYSEYDPTRPFSEASMMGLLTNLADRELVHMINWAKRVPGFVDLTLHDQVHLLECAWMEILMIGLVWRSMEHPGKLLFAPNLLLDRNQGKCVEGGVEIFDMLLATSSRFRMMNLQGEEFVCLKSIILLNSGVYTFLSSTLKSLEEKDHIHRVLDKITDTLIHLMAKAGLTLQQQHMRLAQLLLILSHIRHMSNKRMEHLYSMKCKNVVPLSDLLLEMLDAHRL

SEQ ID NO: 213 - DNA, 2364 bp, Artificial Sequence
  Description of Artificial Sequence: Synthetic Construct
atgtgccaccaacagctcgtgatcagctggttctccctggtgttcctggctagccccctggtggccatctgggagctcaagaaagacgtgtacgtggtggaactggactggtaccccgacgcccctggcgaaatggtggtgctgacatgcgacacccctgaggaggatggcattacctggaccctcgatcagagctccgaggtgctgggcagcggcaaaaccctgaccatccaggtgaaggagtttggcgatgccggccagtacacatgtcacaagggcggcgaggtgctgagccactccctgctgctgctccacaagaaggaagatggcatctggagcaccgacattctgaaggatcagaaggagcccaagaacaagacattcctgaggtgtgaggccaagaactacagcggcaggtttacctgctggtggctgacaacaatcagcaccgacctcacattctccgtcaagtcctccaggggttcttccgaccctcaaggcgtgacatgcggcgctgccaccctgagcgctgagagagtcaggggcgacaacaaggagtacgagtacagcgtcgaatgtcaggaggacagcgcctgtcccgccgctgaagagagcctgcctatcgaggtgatggtggacgccgtgcacaaactgaagtatgagaattacacctccagcttcttcatcagggacatcatcaaacccgatccccccaagaacctgcagctgaagcctctgaagaacagcagacaggtcgaagtgtcctgggagtaccctgatacctggtccacaccccacagctacttcagcctgaccttttgcgtgcaggtgcagggcaagagcaaaagggagaagaaggacagggtgtttaccgacaagacctccgccacagtgatttgcagaaagaacgcctccatcagcgtgagggcccaggacaggtattacagcagctcctggagcgaatgggctagcgtgccctgtagcggaggaggaggcagcggaggaggaggttctggaggaggcggcagcagaaacctgcctgtcgctacccccgaccccggaatgttcccctgcctgcaccactcccagaacctcctgagggccgtgtccaacatgctgcagaaggctagacagaccctcgaattctacccctgtaccagcgaggagatcgaccatgaggacatcaccaaggataagaccagcaccgtggaggcttgcctgcctctggagctgaccaaaaacgagagctgcctgaacagcagggaaaccagcttcattaccaacggctcctgcctggcctccaggaagacatccttcatgatggccctgtgcctcagcagcatctacgaggacctgaagatgtatcaggtggagtttaagaccatgaatgccaagctgctgatggaccctaagaggcagatcttcctggaccagaatatgctggccgtgattgacgagctgatgcaggccctcaactttaacagcgagaccgtgccccagaaaagcagcctcgaagagcctgacttctacaaaaccaagattaagctgtgtatcctgctgcacgccttcaggatcagggccgtgaccatcgacagggtgatgagctacctgaacgccagcggatcctcactggcgctcagccttactgccgaccaaatggtatcagctcttctggacgcagaacccccaattctttattccgagtacgaccccacacgcccgttcagtgaagcttccatgatgggcctccttacgaaccttgccgaccgggaactcgtgcacatgatcaattgggcgaagcgggtgccggggttcgtagatttgacacttcacgaccaagttcatctcttggaatgtgcttggatggagatattgatgatcggactcgtgtggaggtcaatggagcatcctggtaaacttcttttcgcacccaatctgctcttggatagaaatcagggtaagtgcgtcgagggtggcgttgaaatcttcgacatgctccttgcgacatccagccgattccgaatgatgaatcttcaaggagaggaatttgtctgtcttaagagcattatactcctcaatagtggagtttacaccttcttgtcctctacactgaaatcacttgaggaaaaagatcacatacatagggtgttggataaaatcacggatacactcatacatctgatggcaaaagcaggattgaccctgcaacagcagcacatgcgactggcccaactgctgttgatccttagccatatcagacacatgtctaacaaaaggatggaacatttgtacagcatgaaatgtaagaacgtagtgccactgtccgatttgttgctggaaatgctggacgctcatcggctctga

SEQ ID NO: 214 - protein, 787 aa, Artificial Sequence
  Description of Artificial Sequence: Synthetic Construct
MCHQQLVISWFSLVFLASPLVAIWELKKDVYVVELDWYPDAPGEMVVLTCDTPEEDGITWTLDQSSEVLGSGKTLTIQVKEFGDAGQYTCHKGGEVLSHSLLLLHKKEDGIWSTDILKDQKEPKNKTFLRCEAKNYSGRFTCWWLTTISTDLTFSVKSSRGSSDPQGVTCGAATLSAERVRGDNKEYEYSVECQEDSACPAAEESLPIEVMVDAVHKLKYENYTSSFFIRDIIKPDPPKNLQLKPLKNSRQVEVSWEYPDTWSTPHSYFSLTFCVQVQGKSKREKKDRVFTDKTSATVICRKNASISVRAQDRYYSSSWSEWASVPCSGGGGSGGGGSGGGGSRNLPVATPDPGMFPCLHHSQNLLRAVSNMLQKARQTLEFYPCTSEEIDHEDITKDKTSTVEACLPLELTKNESCLNSRETSFITNGSCLASRKTSFMMALCLSSIYEDLKMYQVEFKTMNAKLLMDPKRQIFLDQNMLAVIDELMQALNFNSETVPQKSSLEEPDFYKTKIKLCILLHAFRIRAVTIDRVMSYLNASGSSLALSLTADQMVSALLDAEPPILYSEYDPTRPFSEASMMGLLTNLADRELVHMINWAKRVPGFVDLTLHDQVHLLECAWMEILMIGLVWRSMEHPGKLLFAPNLLLDRNQGKCVEGGVEIFDMLLATSSRFRMMNLQGEEFVCLKSIILLNSGVYTFLSSTLKSLEEKDHIHRVLDKITDTLIHLMAKAGLTLQQQHNRLAQLLLILSHIRHMSNKRMEHLYSMKCKNVVPLSDLLLEMLDAHRL

SEQ ID NO: 215 - DNA, 2364 bp, Artificial Sequence
  Description of Artificial Sequence: Synthetic Construct
atgtgccaccaacagctcgtgatcagctggttctccctggtgttcctggctagccccctggtggccatctgggagctcaagaaagacgtgtacgtggtggaactggactggtaccccgacgcccctggcgaaatggtggtgctgacatgcgacacccctgaggaggatggcattacctggaccctcgatcagagctccgaggtgctgggcagcggcaaaaccctgaccatccaggtgaaggagtttggcgatgccggccagtacacatgtcacaagggcggcgaggtgctgagccactccctgctgctgctccacaagaaggaagatggcatctggagcaccgacattctgaaggatcagaaggagcccaagaacaagacattcctgaggtgtgaggccaagaactacagcggcaggtttacctgctggtggctgacaacaatcagcaccgacctcacattctccgtcaagtcctccaggggttcttccgaccctcaaggcgtgacatgcggcgctgccaccctgagcgctgagagagtcaggggcgacaacaaggagtacgagtacagcgtcgaatgtcaggaggacagcgcctgtcccgccgctgaagagagcctgcctatcgaggtgatggtggacgccgtgcacaaactgaagtatgagaattacacctccagcttcttcatcagggacatcatcaaacccgatccccccaagaacctgcagctgaagcctctgaagaacagcagacaggtcgaagtgtcctgggagtaccctgatacctggtccacaccccacagctacttcagcctgaccttttgcgtgcaggtgcagggcaagagcaaaagggagaagaaggacagggtgtttaccgacaagacctccgccacagtgatttgcagaaagaacgcctccatcagcgtgagggcccaggacaggtattacagcagctcctggagcgaatgggctagcgtgccctgtagcggaggaggaggcagcggaggaggaggttctggaggaggcggcagcagaaacctgcctgtcgctacccccgaccccggaatgttcccctgcctgcaccactcccagaacctcctgagggccgtgtccaacatgctgcagaaggctagacagaccctcgaattctacccctgtaccagcgaggagatcgaccatgaggacatcaccaaggataagaccagcaccgtggaggcttgcctgcctctggagctgaccaaaaacgagagctgcctgaacagcagggaaaccagcttcattaccaacggctcctgcctggcctccaggaagacatccttcatgatggccctgtgcctcagcagcatctacgaggacctgaagatgtatcaggtggagtttaagaccatgaatgccaagctgctgatggaccctaagaggcagatcttcctggaccagaatatgctggccgtgattgacgagctgatgcaggccctcaactttaacagcgagaccgtgccccagaaaagcagcctcgaagagcctgacttctacaaaaccaagattaagctgtgtatcctgctgcacgccttcaggatcagggccgtgaccatcgacagggtgatgagctacctgaacgccagcggatcctcactggcgctcagccttactgccgaccaaatggtatcagctcttctggacgcagaacccccaattctttattccgagtacgaccccacacgcccgttcagtgaagcttccatgatgggcctccttacgaaccttgccgaccgggaactcgtgcacatgatcaattgggcgaagcgggtgccggggttcgtagatttgacacttcacgaccaagttcatctcttggaatgtgcttggatggagatattgatgatcggactcgtgtggaggtcaatggagcatcctggtaaacttcttttcgcacccaatctgctcttggatagaaatcagggtaagtgcgtcgagggtggcgttgaaatcttcgacatgctccttgcgacatccagccgattccgaatgatgaatcttcaaggagaggaatttgtctgtcttaagagcattatactcctcaatagtggagtttacaccttcttgtcctctacactgaaatcacttgaggaaaaagatcacatacatagggtgttggataaaatcacggatacactcatacatctgatggcaaaagcaggattgaccctgcaacagcagcacaaccgactggcccaactgctgttgatccttagccatatcagacacatgtctaacaaaaggatggaacatttgtacagcatgaaatgtaagaacgtagtgccactgtccgatttgttgctggaaatgctggacgctcatcggctctga

SEQ ID NO: 216 - protein, 787 aa, Artificial Sequence
  Description of Artificial Sequence: Synthetic Construct
MCHQQLVISWFSLVFLASPLVAIWELKKDVYVVELDWYPDAPGEMVVLTCDTPEEDGITWTLDQSSEVLGSGKTLTIQVKEFGDAGQYTCHKGGEVLSHSLLLLHKKEDGIWSTDILKDQKEPKNKTFLRCEAKNYSGRFTCWWLTTISTDLTFSVKSSRGSSDPQGVTCGAATLSAERVRGDNKEYEYSVECQEDSACPAAEESLPIEVMVDAVHKLKYENYTSSFFIRDIIKPDPPKNLQLKPLKNSRQVEVSWEYPDTWSTPHSYFSLTFCVQVQGKSKREKKDRVFTDKTSATVICRKNASISVRAQDRYYSSSWSEWASVPCSGGGGSGGGGSGGGGSRNLPVATPDPGMFPCLHHSQNLLRAVSNMLQKARQTLEFYPCTSEEIDHEDITKDKTSTVEACLPLELTKNESCLNSRETSFITNGSCLASRKTSFMMALCLSSIYEDLKMYQVEFKTMNAKLLMDPKRQIFLDQNMLAVIDELMQALNFNSETVPQKSSLEEPDFYKTKIKLCILLHAFRIRAVTIDRVMSYLNASGSSLALSLTADQMVSALLDAEPPILYSEYDPTRPFSEASMMGLLTNLADRELVHMINWAKRVPGFVDLTLHDQVHLLECAWMEILMIGLVWRSMEHPGKLLFAPNLLLDRNQGKCVEGGVEIFDMLLATSSRFRMMNLQGEEFVCLKSIILLNSGVYTFLSSTLKSLEEKDHIHRVLDKITDTLIHLMAKAGLTLQQQHKRLAQLLLILSHIRHMSNKRMEHLYSMKCKNVVPLSDLLLEMLDAHRL

SEQ ID NO: 217 - DNA, 2364 bp, Artificial Sequence
  Description of Artificial Sequence: Synthetic Construct
atgtgccaccaacagctcgtgatcagctggttctccctggtgttcctggctagccccctggtggccatctgggagctcaagaaagacgtgtacgtggtggaactggactggtaccccgacgcccctggcgaaatggtggtgctgacatgcgacacccctgaggaggatggcattacctggaccctcgatcagagctccgaggtgctgggcagcggcaaaaccctgaccatccaggtgaaggagtttggcgatgccggccagtacacatgtcacaagggcggcgaggtgctgagccactccctgctgctgctccacaagaaggaagatggcatctggagcaccgacattctgaaggatcagaaggagcccaagaacaagacattcctgaggtgtgaggccaagaactacagcggcaggtttacctgctggtggctgacaacaatcagcaccgacctcacattctccgtcaagtcctccaggggttcttccgaccctcaaggcgtgacatgcggcgctgccaccctgagcgctgagagagtcaggggcgacaacaaggagtacgagtacagcgtcgaatgtcaggaggacagcgcctgtcccgccgctgaagagagcctgcctatcgaggtgatggtggacgccgtgcacaaactgaagtatgagaattacacctccagcttcttcatcagggacatcatcaaacccgatccccccaagaacctgcagctgaagcctctgaagaacagcagacaggtcgaagtgtcctgggagtaccctgatacctggtccacaccccacagctacttcagcctgaccttttgcgtgcaggtgcagggcaagagcaaaagggagaagaaggacagggtgtttaccgacaagacctccgccacagtgatttgcagaaagaacgcctccatcagcgtgagggcccaggacaggtattacagcagctcctggagcgaatgggctagcgtgccctgtagcggaggaggaggcagcggaggaggaggttctggaggaggcggcagcagaaacctgcctgtcgctacccccgaccccggaatgttcccctgcctgcaccactcccagaacctcctgagggccgtgtccaacatgctgcagaaggctagacagaccctcgaattctacccctgtaccagcgaggagatcgaccatgaggacatcaccaaggataagaccagcaccgtggaggcttgcctgcctctggagctgaccaaaaacgagagctgcctgaacagcagggaaaccagcttcattaccaacggctcctgcctggcctccaggaagacatccttcatgatggccctgtgcctcagcagcatctacgaggacctgaagatgtatcaggtggagtttaagaccatgaatgccaagctgctgatggaccctaagaggcagatcttcctggaccagaatatgctggccgtgattgacgagctgatgcaggccctcaactttaacagcgagaccgtgccccagaaaagcagcctcgaagagcctgacttctacaaaaccaagattaagctgtgtatcctgctgcacgccttcaggatcagggccgtgaccatcgacagggtgatgagctacctgaacgccagcggatcctcactggcgctcagccttactgccgaccaaatggtatcagctcttctggacgcagaacccccaattctttattccgagtacgaccccacacgcccgttcagtgaagcttccatgatgggcctccttacgaaccttgccgaccgggaactcgtgcacatgatcaattgggcgaagcgggtgccggggttcgtagatttgacacttcacgaccaagttcatctcttggaatgtgcttggatggagatattgatgatcggactcgtgtggaggtcaatggagcatcctggtaaacttcttttcgcacccaatctgctcttggatagaaatcagggtaagtgcgtcgagggtggcgttgaaatcttcgacatgctccttgcgacatccagccgattccgaatgatgaatcttcaaggagaggaatttgtctgtcttaagagcattatactcctcaatagtggagtttacaccttcttgtcctctacactgaaatcacttgaggaaaaagatcacatacatagggtgttggataaaatcacggatacactcatacatctgatggcaaaagcaggattgaccctgcaacagcagcacaagcgactggcccaactgctgttgatccttagccatatcagacacatgtctaacaaaaggatggaacatttgtacagcatgaaatgtaagaacgtagtgccactgtccgatttgttgctggaaatgctggacgctcatcggctctga

SEQ ID NO: 218 - protein, 787 aa, Artificial Sequence
  Description of Artificial Sequence: Synthetic Construct
MCHQQLVISWFSLVFLASPLVAIWELKKDVYVVELDWYPDAPGEMVVLTCDTPEEDGITWTLDQSSEVLGSGKTLTIQVKEFGDAGQYTCHKGGEVLSHSLLLLHKKEDGIWSTDILKDQKEPKNKTFLRCEAKNYSGRFTCWWLTTISTDLTFSVKSSRGSSDPQGVTCGAATLSAERVRGDNKEYEYSVECQEDSACPAAEESLPIEVMVDAVHKLKYENYTSSFFIRDIIKPDPPKNLQLKPLKNSRQVEVSWEYPDTWSTPHSYFSLTFCVQVQGKSKREKKDRVFTDKTSATVICRKNASISVRAQDRYYSSSWSEWASVPCSGGGGSGGGGSGGGGSRNLPVATPDPGMFPCLHHSQNLLRAVSNMLQKARQTLEFYPCTSEEIDHEDITKDKTSTVEACLPLELTKNESCLNSRETSFITNGSCLASRKTSFMMALCLSSIYEDLKMYQVEFKTMNAKLLMDPKRQIFLDQNMLAVIDELMQALNFNSETVPQKSSLEEPDFYKTKIKLCILLHAFRIRAVTIDRVMSYLNASGSSLALSLTADQMVSALLDAEPPILYSEYDPTRPFSEASMMGLLTNLADRELVHMINWAKRVPGFVDLTLHDQVHLLECAWMEILMIGLVWRSMEHPGKLLFAPNLLLDRNQGKCVEGGVEIFDMLLATSSRFRMMNLQGEEFVCLKSIILLNSGVYTFLSSTLKSLEEKDHIHRVLDKITDTLIHLMAKAGLTLQQQHVRLAQLLLILSHIRHMSNKRMEHLYSMKCKNVVPLSDLLLEMLDAHRL

SEQ ID NO: 219 - DNA, 2364 bp, Artificial Sequence
  Description of Artificial Sequence: Synthetic Construct
atgtgccaccaacagctcgtgatcagctggttctccctggtgttcctggctagccccctggtggccatctgggagctcaagaaagacgtgtacgtggtggaactggactggtaccccgacgcccctggcgaaatggtggtgctgacatgcgacacccctgaggaggatggcattacctggaccctcgatcagagctccgaggtgctgggcagcggcaaaaccctgaccatccaggtgaaggagtttggcgatgccggccagtacacatgtcacaagggcggcgaggtgctgagccactccctgctgctgctccacaagaaggaagatggcatctggagcaccgacattctgaaggatcagaaggagcccaagaacaagacattcctgaggtgtgaggccaagaactacagcggcaggtttacctgctggtggctgacaacaatcagcaccgacctcacattctccgtcaagtcctccaggggttcttccgaccctcaaggcgtgacatgcggcgctgccaccctgagcgctgagagagtcaggggcgacaacaaggagtacgagtacagcgtcgaatgtcaggaggacagcgcctgtcccgccgctgaagagagcctgcctatcgaggtgatggtggacgccgtgcacaaactgaagtatgagaattacacctccagcttcttcatcagggacatcatcaaacccgatccccccaagaacctgcagctgaagcctctgaagaacagcagacaggtcgaagtgtcctgggagtaccctgatacctggtccacaccccacagctacttcagcctgaccttttgcgtgcaggtgcagggcaagagcaaaagggagaagaaggacagggtgtttaccgacaagacctccgccacagtgatttgcagaaagaacgcctccatcagcgtgagggcccaggacaggtattacagcagctcctggagcgaatgggctagcgtgccctgtagcggaggaggaggcagcggaggaggaggttctggaggaggcggcagcagaaacctgcctgtcgctacccccgaccccggaatgttcccctgcctgcaccactcccagaacctcctgagggccgtgtccaacatgctgcagaaggctagacagaccctcgaattctacccctgtaccagcgaggagatcgaccatgaggacatcaccaaggataagaccagcaccgtggaggcttgcctgcctctggagctgaccaaaaacgagagctgcctgaacagcagggaaaccagcttcattaccaacggctcctgcctggcctccaggaagacatccttcatgatggccctgtgcctcagcagcatctacgaggacctgaagatgtatcaggtggagtttaagaccatgaatgccaagctgctgatggaccctaagaggcagatcttcctggaccagaatatgctggccgtgattgacgagctgatgcaggccctcaactttaacagcgagaccgtgccccagaaaagcagcctcgaagagcctgacttctacaaaaccaagattaagctgtgtatcctgctgcacgccttcaggatcagggccgtgaccatcgacagggtgatgagctacctgaacgccagcggatcctcactggcgctcagccttactgccgaccaaatggtatcagctcttctggacgcagaacccccaattctttattccgagtacgaccccacacgcccgttcagtgaagcttccatgatgggcctccttacgaaccttgccgaccgggaactcgtgcacatgatcaattgggcgaagcgggtgccggggttcgtagatttgacacttcacgaccaagttcatctcttggaatgtgcttggatggagatattgatgatcggactcgtgtggaggtcaatggagcatcctggtaaacttcttttcgcacccaatctgctcttggatagaaatcagggtaagtgcgtcgagggtggcgttgaaatcttcgacatgctccttgcgacatccagccgattccgaatgatgaatcttcaaggagaggaatttgtctgtcttaagagcattatactcctcaatagtggagtttacaccttcttgtcctctacactgaaatcacttgaggaaaaagatcacatacatagggtgttggataaaatcacggatacactcatacatctgatggcaaaagcaggattgaccctgcaacagcagcacgtgcgactggcccaactgctgttgatccttagccatatcagacacatgtctaacaaaaggatggaacatttgtacagcatgaaatgtaagaacgtagtgccactgtccgatttgttgctggaaatgctggacgctcatcggctctga

SEQ ID NO: 220 - protein, 787 aa, Artificial Sequence
  Description of Artificial Sequence: Synthetic Construct
MCHQQLVISWFSLVFLASPLVAIWELKKDVYVVELDWYPDAPGEMVVLTCDTPEEDGITWTLDQSSEVLGSGKTLTIQVKEFGDAGQYTCHKGGEVLSHSLLLLHKKEDGIWSTDILKDQKEPKNKTFLRCEAKNYSGRFTCWWLTTISTDLTFSVKSSRGSSDPQGVTCGAATLSAERVRGDNKEYEYSVECQEDSACPAAEESLPIEVMVDAVHKLKYENYTSSFFIRDIIKPDPPKNLQLKPLKNSRQVEVSWEYPDTWSTPHSYFSLTFCVQVQGKSKREKKDRVFTDKTSATVICRKNASISVRAQDRYYSSSWSEWASVPCSGGGGSGGGGSGGGGSRNLPVATPDPGMFPCLHHSQNLLRAVSNMLQKARQTLEFYPCTSEEIDHEDITKDKTSTVEACLPLELTKNESCLNSRETSFITNGSCLASRKTSFMMALCLSSIYEDLKMYQVEFKTMNAKLLMDPKRQIFLDQNMLAVIDELMQALNFNSETVPQKSSLEEPDFYKTKIKLCILLHAFRIRAVTIDRVMSYLNASGSSLALSLTADQMVSALLDAEPPILYSEYDPTRPFSEASMMGLLTNLADRELVHMINWAKRVPGFVDLTLHDQVHLLECAWMEILMIGLVWRSMEHPGKLLFAPNLLLDRNQGKCVEGGVEIFDMLLATSSRFRMMNLQGEEFVCLKSIILLNSGVYTFLSSTLKSLEEKDHIHRVLDKITDTLIHLMAKAGLTLQQQHSRLAQLLLILSHIRHMSNKRMEHLYSMKCKNVVPLSDLLLEMLDAHRL

SEQ ID NO: 221 - DNA, 2364 bp, Artificial Sequence
  Description of Artificial Sequence: Synthetic Construct
atgtgccaccaacagctcgtgatcagctggttctccctggtgttcctggctagccccctggtggccatctgggagctcaagaaagacgtgtacgtggtggaactggactggtaccccgacgcccctggcgaaatggtggtgctgacatgcgacacccctgaggaggatggcattacctggaccctcgatcagagctccgaggtgctgggcagcggcaaaaccctgaccatccaggtgaaggagtttggcgatgccggccagtacacatgtcacaagggcggcgaggtgctgagccactccctgctgctgctccacaagaaggaagatggcatctggagcaccgacattctgaaggatcagaaggagcccaagaacaagacattcctgaggtgtgaggccaagaactacagcggcaggtttacctgctggtggctgacaacaatcagcaccgacctcacattctccgtcaagtcctccaggggttcttccgaccctcaaggcgtgacatgcggcgctgccaccctgagcgctgagagagtcaggggcgacaacaaggagtacgagtacagcgtcgaatgtcaggaggacagcgcctgtcccgccgctgaagagagcctgcctatcgaggtgatggtggacgccgtgcacaaactgaagtatgagaattacacctccagcttcttcatcagggacatcatcaaacccgatccccccaagaacctgcagctgaagcctctgaagaacagcagacaggtcgaagtgtcctgggagtaccctgatacctggtccacaccccacagctacttcagcctgaccttttgcgtgcaggtgcagggcaagagcaaaagggagaagaaggacagggtgtttaccgacaagacctccgccacagtgatttgcagaaagaacgcctccatcagcgtgagggcccaggacaggtattacagcagctcctggagcgaatgggctagcgtgccctgtagcggaggaggaggcagcggaggaggaggttctggaggaggcggcagcagaaacctgcctgtcgctacccccgaccccggaatgttcccctgcctgcaccactcccagaacctcctgagggccgtgtccaacatgctgcagaaggctagacagaccctcgaattctacccctgtaccagcgaggagatcgaccatgaggacatcaccaaggataagaccagcaccgtggaggcttgcctgcctctggagctgaccaaaaacgagagctgcctgaacagcagggaaaccagcttcattaccaacggctcctgcctggcctccaggaagacatccttcatgatggccctgtgcctcagcagcatctacgaggacctgaagatgtatcaggtggagtttaagaccatgaatgccaagctgctgatggaccctaagaggcagatcttcctggaccagaatatgctggccgtgattgacgagctgatgcaggccctcaactttaacagcgagaccgtgccccagaaaagcagcctcgaagagcctgacttctacaaaaccaagattaagctgtgtatcctgctgcacgccttcaggatcagggccgtgaccatcgacagggtgatgagctacctgaacgccagcggatcctcactggcgctcagccttactgccgaccaaatggtatcagctcttctggacgcagaacccccaattctttattccgagtacgaccccacacgcccgttcagtgaagcttccatgatgggcctccttacgaaccttgccgaccgggaactcgtgcacatgatcaattgggcgaagcgggtgccggggttcgtagatttgacacttcacgaccaagttcatctcttggaatgtgcttggatggagatattgatgatcggactcgtgtggaggtcaatggagcatcctggtaaacttcttttcgcacccaatctgctcttggatagaaatcagggtaagtgcgtcgagggtggcgttgaaatcttcgacatgctccttgcgacatccagccgattccgaatgatgaatcttcaaggagaggaatttgtctgtcttaagagcattatactcctcaatagtggagtttacaccttcttgtcctctacactgaaatcacttgaggaaaaagatcacatacatagggtgttggataaaatcacggatacactcatacatctgatggcaaaagcaggattgaccctgcaacagcagcacagccgactggcccaactgctgttgatccttagccatatcagacacatgtctaacaaaaggatggaacatttgtacagcatgaaatgtaagaacgtagtgccactgtccgatttgttgctggaaatgctggacgctcatcggctctga

SEQ ID NO: 222 - protein, 787 aa, Artificial Sequence
  Description of Artificial Sequence: Synthetic Construct
MCHQQLVISWFSLVFLASPLVAIWELKKDVYVVELDWYPDAPGEMVVLTCDTPEEDGITWTLDQSSEVLGSGKTLTIQVKEFGDAGQYTCHKGGEVLSHSLLLLHKKEDGIWSTDILKDQKEPKNKTFLRCEAKNYSGRFTCWWLTTISTDLTFSVKSSRGSSDPQGVTCGAATLSAERVRGDNKEYEYSVECQEDSACPAAEESLPIEVMVDAVHKLKYENYTSSFFIRDIIKPDPPKNLQLKPLKNSRQVEVSWEYPDTWSTPHSYFSLTFCVQVQGKSKREKKDRVFTDKTSATVICRKNASISVRAQDRYYSSSWSEWASVPCSGGGGSGGGGSGGGGSRNLPVATPDPGMFPCLHHSQNLLRAVSNMLQKARQTLEFYPCTSEEIDHEDITKDKTSTVEACLPLELTKNESCLNSRETSFITNGSCLASRKTSFMMALCLSSIYEDLKMYQVEFKTMNAKLLMDPKRQIFLDQNMLAVIDELMQALNFNSETVPQKSSLEEPDFYKTKIKLCILLHAFRIRAVTIDRVMSYLNASGSSLALSLTADQMVSALLDAEPPILYSEYDPTRPFSEASMMGLLTNLADRELVHMINWAKRVPGFVDLTLHDQVHLLECAWMEILMIGLVWRSMEHPGKLLFAPNLLLDRNQGKCVEGGVEIFDMLLATSSRFRMMNLQGEEFVCLKSIILLNSGVYTFLSSTLKSLEEKDHIHRVLDKITDTLIHLMAKAGLTLQQQHCRLAQLLLILSHIRHMSNKRMEHLYSMKCKNVVPLSDLLLEMLDAHRL

SEQ ID NO: 223 - DNA, 2364 bp, Artificial Sequence
  Description of Artificial Sequence: Synthetic Construct
atgtgccaccaacagctcgtgatcagctggttctccctggtgttcctggctagccccctggtggccatctgggagctcaagaaagacgtgtacgtggtggaactggactggtaccccgacgcccctggcgaaatggtggtgctgacatgcgacacccctgaggaggatggcattacctggaccctcgatcagagctccgaggtgctgggcagcggcaaaaccctgaccatccaggtgaaggagtttggcgatgccggccagtacacatgtcacaagggcggcgaggtgctgagccactccctgctgctgctccacaagaaggaagatggcatctggagcaccgacattctgaaggatcagaaggagcccaagaacaagacattcctgaggtgtgaggccaagaactacagcggcaggtttacctgctggtggctgacaacaatcagcaccgacctcacattctccgtcaagtcctccaggggttcttccgaccctcaaggcgtgacatgcggcgctgccaccctgagcgctgagagagtcaggggcgacaacaaggagtacgagtacagcgtcgaatgtcaggaggacagcgcctgtcccgccgctgaagagagcctgcctatcgaggtgatggtggacgccgtgcacaaactgaagtatgagaattacacctccagcttcttcatcagggacatcatcaaacccgatccccccaagaacctgcagctgaagcctctgaagaacagcagacaggtcgaagtgtcctgggagtaccctgatacctggtccacaccccacagctacttcagcctgaccttttgcgtgcaggtgcagggcaagagcaaaagggagaagaaggacagggtgtttaccgacaagacctccgccacagtgatttgcagaaagaacgcctccatcagcgtgagggcccaggacaggtattacagcagctcctggagcgaatgggctagcgtgccctgtagcggaggaggaggcagcggaggaggaggttctggaggaggcggcagcagaaacctgcctgtcgctacccccgaccccggaatgttcccctgcctgcaccactcccagaacctcctgagggccgtgtccaacatgctgcagaaggctagacagaccctcgaattctacccctgtaccagcgaggagatcgaccatgaggacatcaccaaggataagaccagcaccgtggaggcttgcctgcctctggagctgaccaaaaacgagagctgcctgaacagcagggaaaccagcttcattaccaacggctcctgcctggcctccaggaagacatccttcatgatggccctgtgcctcagcagcatctacgaggacctgaagatgtatcaggtggagtttaagaccatgaatgccaagctgctgatggaccctaagaggcagatcttcctggaccagaatatgctggccgtgattgacgagctgatgcaggccctcaactttaacagcgagaccgtgccccagaaaagcagcctcgaagagcctgacttctacaaaaccaagattaagctgtgtatcctgctgcacgccttcaggatcagggccgtgaccatcgacagggtgatgagctacctgaacgccagcggatcctcactggcgctcagccttactgccgaccaaatggtatcagctcttctggacgcagaacccccaattctttattccgagtacgaccccacacgcccgttcagtgaagcttccatgatgggcctccttacgaaccttgccgaccgggaactcgtgcacatgatcaattgggcgaagcgggtgccggggttcgtagatttgacacttcacgaccaagttcatctcttggaatgtgcttggatggagatattgatgatcggactcgtgtggaggtcaatggagcatcctggtaaacttcttttcgcacccaatctgctcttggatagaaatcagggtaagtgcgtcgagggtggcgttgaaatcttcgacatgctccttgcgacatccagccgattccgaatgatgaatcttcaaggagaggaatttgtctgtcttaagagcattatactcctcaatagtggagtttacaccttcttgtcctctacactgaaatcacttgaggaaaaagatcacatacatagggtgttggataaaatcacggatacactcatacatctgatggcaaaagcaggattgaccctgcaacagcagcactgccgactggcccaactgctgttgatccttagccatatcagacacatgtctaacaaaaggatggaacatttgtacagcatgaaatgtaagaacgtagtgccactgtccgatttgttgctggaaatgctggacgctcatcggctctga

SEQ ID NO: 224 - protein, 787 aa, Artificial Sequence
  Description of Artificial Sequence: Synthetic Construct
MCHQQLVISWFSLVFLASPLVAIWELKKDVYVVELDWYPDAPGEMVVLTCDTPEEDGITWTLDQSSEVLGSGKTLTIQVKEFGDAGQYTCHKGGEVLSHSLLLLHKKEDGIWSTDILKDQKEPKNKTFLRCEAKNYSGRFTCWWLTTISTDLTFSVKSSRGSSDPQGVTCGAATLSAERVRGDNKEYEYSVECQEDSACPAAEESLPIEVMVDAVHKLKYENYTSSFFIRDIIKPDPPKNLQLKPLKNSRQVEVSWEYPDTWSTPHSYFSLTFCVQVQGKSKREKKDRVFTDKTSATVICRKNASISVRAQDRYYSSSWSEWASVPCSGGGGSGGGGSGGGGSRNLPVATPDPGMFPCLHHSQNLLRAVSNMLQKARQTLEFYPCTSEEIDHEDITKDKTSTVEACLPLELTKNESCLNSRETSFITNGSCLASRKTSFMMALCLSSIYEDLKMYQVEFKTMNAKLLMDPKRQIFLDQNMLAVIDELMQALNFNSETVPQKSSLEEPDFYKTKIKLCILLHAFRIRAVTIDRVMSYLNASGSSLALSLTADQMVSALLDAEPPILYSEYDPTRPFSEASMMGLLTNLADRELVHMINWAKRVPGFVDLTLHDQVHLLECAWMEILMIGLVWRSMEHPGKLLFAPNLLLDRNQGKCVEGGVEIFDMLLATSSRFRMMNLQGEEFVCLKSIILLNSGVYTFLSSTLKSLEEKDHIHRVLDKITDTLIHLMAKAGLTLQQQHWRLAQLLLILSHIRHMSNKRMEHLYSMKCKNVVPLSDLLLEMLDAHRL

SEQ ID NO: 225 - DNA, 2364 bp, Artificial Sequence
  Description of Artificial Sequence: Synthetic Construct
atgtgccaccaacagctcgtgatcagctggttctccctggtgttcctggctagccccctggtggccatctgggagctcaagaaagacgtgtacgtggtggaactggactggtaccccgacgcccctggcgaaatggtggtgctgacatgcgacacccctgaggaggatggcattacctggaccctcgatcagagctccgaggtgctgggcagcggcaaaaccctgaccatccaggtgaaggagtttggcgatgccggccagtacacatgtcacaagggcggcgaggtgctgagccactccctgctgctgctccacaagaaggaagatggcatctggagcaccgacattctgaaggatcagaaggagcccaagaacaagacattcctgaggtgtgaggccaagaactacagcggcaggtttacctgctggtggctgacaacaatcagcaccgacctcacattctccgtcaagtcctccaggggttcttccgaccctcaaggcgtgacatgcggcgctgccaccctgagcgctgagagagtcaggggcgacaacaaggagtacgagtacagcgtcgaatgtcaggaggacagcgcctgtcccgccgctgaagagagcctgcctatcgaggtgatggtggacgccgtgcacaaactgaagtatgagaattacacctccagcttcttcatcagggacatcatcaaacccgatccccccaagaacctgcagctgaagcctctgaagaacagcagacaggtcgaagtgtcctgggagtaccctgatacctggtccacaccccacagctacttcagcctgaccttttgcgtgcaggtgcagggcaagagcaaaagggagaagaaggacagggtgtttaccgacaagacctccgccacagtgatttgcagaaagaacgcctccatcagcgtgagggcccaggacaggtattacagcagctcctggagcgaatgggctagcgtgccctgtagcggaggaggaggcagcggaggaggaggttctggaggaggcggcagcagaaacctgcctgtcgctacccccgaccccggaatgttcccctgcctgcaccactcccagaacctcctgagggccgtgtccaacatgctgcagaaggctagacagaccctcgaattctacccctgtaccagcgaggagatcgaccatgaggacatcaccaaggataagaccagcaccgtggaggcttgcctgcctctggagctgaccaaaaacgagagctgcctgaacagcagggaaaccagcttcattaccaacggctcctgcctggcctccaggaagacatccttcatgatggccctgtgcctcagcagcatctacgaggacctgaagatgtatcaggtggagtttaagaccatgaatgccaagctgctgatggaccctaagaggcagatcttcctggaccagaatatgctggccgtgattgacgagctgatgcaggccctcaactttaacagcgagaccgtgccccagaaaagcagcctcgaagagcctgacttctacaaaaccaagattaagctgtgtatcctgctgcacgccttcaggatcagggccgtgaccatcgacagggtgatgagctacctgaacgccagcggatcctcactggcgctcagccttactgccgaccaaatggtatcagctcttctggacgcagaacccccaattctttattccgagtacgaccccacacgcccgttcagtgaagcttccatgatgggcctccttacgaaccttgccgaccgggaactcgtgcacatgatcaattgggcgaagcgggtgccggggttcgtagatttgacacttcacgaccaagttcatctcttggaatgtgcttggatggagatattgatgatcggactcgtgtggaggtcaatggagcatcctggtaaacttcttttcgcacccaatctgctcttggatagaaatcagggtaagtgcgtcgagggtggcgttgaaatcttcgacatgctccttgcgacatccagccgattccgaatgatgaatcttcaaggagaggaatttgtctgtcttaagagcattatactcctcaatagtggagtttacaccttcttgtcctctacactgaaatcacttgaggaaaaagatcacatacatagggtgttggataaaatcacggatacactcatacatctgatggcaaaagcaggattgaccctgcaacagcagcactggcgactagcccaactgctgttgatccttagccatatcagacacatgtctaacaaaaggatggaacatttgtacagcatgaaatgtaagaacgtagtgccactgtccgatttgttgctggaaatgctggacgctcatcggctctga

SEQ ID NO: 226 - protein, 787 aa, Artificial Sequence
  Description of Artificial Sequence: Synthetic Construct
MCHQQLVISWFSLVFLASPLVAIWELKKDVYVVELDWYPDAPGEMVVLTCDTPEEDGITWTLDQSSEVLGSGKTLTIQVKEFGDAGQYTCHKGGEVLSHSLLLLHKKEDGIWSTDILKDQKEPKNKTFLRCEAKNYSGRFTCWWLTTISTDLTFSVKSSRGSSDPQGVTCGAATLSAERVRGDNKEYEYSVECQEDSACPAAEESLPIEVMVDAVHKLKYENYTSSFFIRDIIKPDPPKNLQLKPLKNSRQVEVSWEYPDTWSTPHSYFSLTFCVQVQGKSKREKKDRVFTDKTSATVICRKNASISVRAQDRYYSSSWSEWASVPCSGGGGSGGGGSGGGGSRNLPVATPDPGMFPCLHHSQNLLRAVSNMLQKARQTLEFYPCTSEEIDHEDITKDKTSTVEACLPLELTKNESCLNSRETSFITNGSCLASRKTSFMMALCLSSIYEDLKMYQVEFKTMNAKLLMDPKRQIFLDQNMLAVIDELMQALNFNSETVPQKSSLEEPDFYKTKIKLCILLHAFRIRAVTIDRVMSYLNASGSSLALSLTADQMVSALLDAEPPILYSEYDPTRPFSEASMMGLLTNLADRELVHMINWAKRVPGFVDLTLHDQVHLLECAWMEILMIGLVWRSMEHPGKLLFAPNLLLDRNQGKCVEGGVEIFDMLLATSSRFRMMNLQGEEFVCLKSIILLNSGVYTFLSSTLKSLEEKDHIHRVLDKITDTLIHLMAKAGLTLQQQHPRLAQLLLILSHIRHMSNKRMEHLYSMKCKNVVPLSDLLLEMLDAHRL

SEQ ID NO: 227 - DNA, 2364 bp, Artificial Sequence
  Description of Artificial Sequence: Synthetic Construct
atgtgccaccaacagctcgtgatcagctggttctccctggtgttcctggctagccccctggtggccatctgggagctcaagaaagacgtgtacgtggtggaactggactggtaccccgacgcccctggcgaaatggtggtgctgacatgcgacacccctgaggaggatggcattacctggaccctcgatcagagctccgaggtgctgggcagcggcaaaaccctgaccatccaggtgaaggagtttggcgatgccggccagtacacatgtcacaagggcggcgaggtgctgagccactccctgctgctgctccacaagaaggaagatggcatctggagcaccgacattctgaaggatcagaaggagcccaagaacaagacattcctgaggtgtgaggccaagaactacagcggcaggtttacctgctggtggctgacaacaatcagcaccgacctcacattctccgtcaagtcctccaggggttcttccgaccctcaaggcgtgacatgcggcgctgccaccctgagcgctgagagagtcaggggcgacaacaaggagtacgagtacagcgtcgaatgtcaggaggacagcgcctgtcccgccgctgaagagagcctgcctatcgaggtgatggtggacgccgtgcacaaactgaagtatgagaattacacctccagcttcttcatcagggacatcatcaaacccgatccccccaagaacctgcagctgaagcctctgaagaacagcagacaggtcgaagtgtcctgggagtaccctgatacctggtccacaccccacagctacttcagcctgaccttttgcgtgcaggtgcagggcaagagcaaaagggagaagaaggacagggtgtttaccgacaagacctccgccacagtgatttgcagaaagaacgcctccatcagcgtgagggcccaggacaggtattacagcagctcctggagcgaatgggctagcgtgccctgtagcggaggaggaggcagcggaggaggaggttctggaggaggcggcagcagaaacctgcctgtcgctacccccgaccccggaatgttcccctgcctgcaccactcccagaacctcctgagggccgtgtccaacatgctgcagaaggctagacagaccctcgaattctacccctgtaccagcgaggagatcgaccatgaggacatcaccaaggataagaccagcaccgtggaggcttgcctgcctctggagctgaccaaaaacgagagctgcctgaacagcagggaaaccagcttcattaccaacggctcctgcctggcctccaggaagacatccttcatgatggccctgtgcctcagcagcatctacgaggacctgaagatgtatcaggtggagtttaagaccatgaatgccaagctgctgatggaccctaagaggcagatcttcctggaccagaatatgctggccgtgattgacgagctgatgcaggccctcaactttaacagcgagaccgtgccccagaaaagcagcctcgaagagcctgacttctacaaaaccaagattaagctgtgtatcctgctgcacgccttcaggatcagggccgtgaccatcgacagggtgatgagctacctgaacgccagcggatcctcactggcgctcagccttactgccgaccaaatggtatcagctcttctggacgcagaacccccaattctttattccgagtacgaccccacacgcccgttcagtgaagcttccatgatgggcctccttacgaaccttgccgaccgggaactcgtgcacatgatcaattgggcgaagcgggtgccggggttcgtagatttgacacttcacgaccaagttcatctcttggaatgtgcttggatggagatattgatgatcggactcgtgtggaggtcaatggagcatcctggtaaacttcttttcgcacccaatctgctcttggatagaaatcagggtaagtgcgtcgagggtggcgttgaaatcttcgacatgctccttgcgacatccagccgattccgaatgatgaatcttcaaggagaggaatttgtctgtcttaagagcattatactcctcaatagtggagtttacaccttcttgtcctctacactgaaatcacttgaggaaaaagatcacatacatagggtgttggataaaatcacggatacactcatacatctgatggcaaaagcaggattgaccctgcaacagcagcacccccgactggcccaactgctgttgatccttagccatatcagacacatgtctaacaaaaggatggaacatttgtacagcatgaaatgtaagaacgtagtgccactgtccgatttgttgctggaaatgctggacgctcatcggctctga

SEQ ID NO: 228 - protein, 787 aa, Artificial Sequence
  Description of Artificial Sequence: Synthetic Construct
MCHQQLVISWFSLVFLASPLVAIWELKKDVYVVELDWYPDAPGEMVVLTCDTPEEDGITWTLDQSSEVLGSGKTLTIQVKEFGDAGQYTCHKGGEVLSHSLLLLHKKEDGIWSTDILKDQKEPKNKTFLRCEAKNYSGRFTCWWLTTISTDLTFSVKSSRGSSDPQGVTCGAATLSAERVRGDNKEYEYSVECQEDSACPAAEESLPIEVMVDAVHKLKYENYTSSFFIRDIIKPDPPKNLQLKPLKNSRQVEVSWEYPDTWSTPHSYFSLTFCVQVQGKSKREKKDRVFTDKTSATVICRKNASISVRAQDRYYSSSWSEWASVPCSGGGGSGGGGSGGGGSRNLPVATPDPGMFPCLHHSQNLLRAVSNMLQKARQTLEFYPCTSEEIDHEDITKDKTSTVEACLPLELTKNESCLNSRETSFITNGSCLASRKTSFMMALCLSSIYEDLKMYQVEFKTMNAKLLMDPKRQIFLDQNMLAVIDELMQALNFNSETVPQKSSLEEPDFYKTKIKLCILLHAFRIRAVTIDRVMSYLNASGSSLALSLTADQMVSALLDAEPPILYSEYDPTRPFSEASMMGLLTNLADRELVHMINWAKRVPGFVDLTLHDQVHLLECAWMEILMIGLVWRSMEHPGKLLFAPNLLLDRNQGKCVEGGVEIFDMLLATSSRFRMMNLQGEEFVCLKSIILLNSGVYTFLSSTLKSLEEKDHIHRVLDKITDTLIHLMAKAGLTLQQQHTRLAQLLLILSHIRHMSNKRMEHLYSMKCKNVVPLSDLLLEMLDAHRL

SEQ ID NO: 229 - DNA, 2364 bp, Artificial Sequence
  Description of Artificial Sequence: Synthetic Construct
atgtgccaccaacagctcgtgatcagctggttctccctggtgttcctggctagccccctggtggccatctgggagctcaagaaagacgtgtacgtggtggaactggactggtaccccgacgcccctggcgaaatggtggtgctgacatgcgacacccctgaggaggatggcattacctggaccctcgatcagagctccgaggtgctgggcagcggcaaaaccctgaccatccaggtgaaggagtttggcgatgccggccagtacacatgtcacaagggcggcgaggtgctgagccactccctgctgctgctccacaagaaggaagatggcatctggagcaccgacattctgaaggatcagaaggagcccaagaacaagacattcctgaggtgtgaggccaagaactacagcggcaggtttacctgctggtggctgacaacaatcagcaccgacctcacattctccgtcaagtcctccaggggttcttccgaccctcaaggcgtgacatgcggcgctgccaccctgagcgctgagagagtcaggggcgacaacaaggagtacgagtacagcgtcgaatgtcaggaggacagcgcctgtcccgccgctgaagagagcctgcctatcgaggtgatggtggacgccgtgcacaaactgaagtatgagaattacacctccagcttcttcatcagggacatcatcaaacccgatccccccaagaacctgcagctgaagcctctgaagaacagcagacaggtcgaagtgtcctgggagtaccctgatacctggtccacaccccacagctacttcagcctgaccttttgcgtgcaggtgcagggcaagagcaaaagggagaagaaggacagggtgtttaccgacaagacctccgccacagtgatttgcagaaagaacgcctccatcagcgtgagggcccaggacaggtattacagcagctcctggagcgaatgggctagcgtgccctgtagcggaggaggaggcagcggaggaggaggttctggaggaggcggcagcagaaacctgcctgtcgctacccccgaccccggaatgttcccctgcctgcaccactcccagaacctcctgagggccgtgtccaacatgctgcagaaggctagacagaccctcgaattctacccctgtaccagcgaggagatcgaccatgaggacatcaccaaggataagaccagcaccgtggaggcttgcctgcctctggagctgaccaaaaacgagagctgcctgaacagcagggaaaccagcttcattaccaacggctcctgcctggcctccaggaagacatccttcatgatggccctgtgcctcagcagcatctacgaggacctgaagatgtatcaggtggagtttaagaccatgaatgccaagctgctgatggaccctaagaggcagatcttcctggaccagaatatgctggccgtgattgacgagctgatgcaggccctcaactttaacagcgagaccgtgccccagaaaagcagcctcgaagagcctgacttctacaaaaccaagattaagctgtgtatcctgctgcacgccttcaggatcagggccgtgaccatcgacagggtgatgagctacctgaacgccagcggatcctcactggcgctcagccttactgccgaccaaatggtatcagctcttctggacgcagaacccccaattctttattccgagtacgaccccacacgcccgttcagtgaagcttccatgatgggcctccttacgaaccttgccgaccgggaactcgtgcacatgatcaattgggcgaagcgggtgccggggttcgtagatttgacacttcacgaccaagttcatctcttggaatgtgcttggatggagatattgatgatcggactcgtgtggaggtcaatggagcatcctggtaaacttcttttcgcacccaatctgctcttggatagaaatcagggtaagtgcgtcgagggtggcgttgaaatcttcgacatgctccttgcgacatccagccgattccgaatgatgaatcttcaaggagaggaatttgtctgtcttaagagcattatactcctcaatagtggagtttacaccttcttgtcctctacactgaaatcacttgaggaaaaagatcacatacatagggtgttggataaaatcacggatacactcatacatctgatggcaaaagcaggattgaccctgcaacagcagcacacccgactggcccaactgctgttgatccttagccatatcagacacatgtctaacaaaaggatggaacatttgtacagcatgaaatgtaagaacgtagtgccactgtccgatttgttgctggaaatgctggacgctcatcggctctga

SEQ ID NO: 230 - protein, 787 aa, Artificial Sequence
  Description of Artificial Sequence: Synthetic Construct
MCHQQLVISWFSLVFLASPLVAIWELKKDVYVVELDWYPDAPGEMVVLTCDTPEEDGITWTLDQSSEVLGSGKTLTIQVKEFGDAGQYTCHKGGEVLSHSLLLLHKKEDGIWSTDILKDQKEPKNKTFLRCEAKNYSGRFTCWWLTTISTDLTFSVKSSRGSSDPQGVTCGAATLSAERVRGDNKEYEYSVECQEDSACPAAEESLPIEVMVDAVHKLKYENYTSSFFIRDIIKPDPPKNLQLKPLKNSRQVEVSWEYPDTWSTPHSYFSLTFCVQVQGKSKREKKDRVFTDKTSATVICRKNASISVRAQDRYYSSSWSEWASVPCSGGGGSGGGGSGGGGSRNLPVATPDPGMFPCLHHSQNLLRAVSNMLQKARQTLEFYPCTSEEIDHEDITKDKTSTVEACLPLELTKNESCLNSRETSFITNGSCLASRKTSFMMALCLSSIYEDLKMYQVEFKTMNAKLLMDPKRQIFLDQNMLAVIDELMQALNFNSETVPQKSSLEEPDFYKTKIKLCILLHAFRIRAVTIDRVMSYLNASGSSLALSLTADQMVSALLDAEPPILYSEYDPTRPFSEASMMGLLTNLADRELVHMINWAKRVPGFVDLTLHDQVHLLECAWMEILMIGLVWRSMEHPGKLLFAPNLLLDRNQGKCVEGGVEIFDMLLATSSRFRMMNLQGEEFVCLKSIILLNSGVYTFLSSTLKSLEEKDHIHRVLDKITDTLIHLMAKAGLTLQQQHARLAQLLLILSHIRHMSNKRMEHLYSMKCKNVVPLSDLLLEMLDAHRL

SEQ ID NO: 231 - DNA, 2364 bp, Artificial Sequence
  Description of Artificial Sequence: Synthetic Construct
atgtgccaccaacagctcgtgatcagctggttctccctggtgttcctggctagccccctggtggccatctgggagctcaagaaagacgtgtacgtggtggaactggactggtaccccgacgcccctggcgaaatggtggtgctgacatgcgacacccctgaggaggatggcattacctggaccctcgatcagagctccgaggtgctgggcagcggcaaaaccctgaccatccaggtgaaggagtttggcgatgccggccagtacacatgtcacaagggcggcgaggtgctgagccactccctgctgctgctccacaagaaggaagatggcatctggagcaccgacattctgaaggatcagaaggagcccaagaacaagacattcctgaggtgtgaggccaagaactacagcggcaggtttacctgctggtggctgacaacaatcagcaccgacctcacattctccgtcaagtcctccaggggttcttccgaccctcaaggcgtgacatgcggcgctgccaccctgagcgctgagagagtcaggggcgacaacaaggagtacgagtacagcgtcgaatgtcaggaggacagcgcctgtcccgccgctgaagagagcctgcctatcgaggtgatggtggacgccgtgcacaaactgaagtatgagaattacacctccagcttcttcatcagggacatcatcaaacccgatccccccaagaacctgcagctgaagcctctgaagaacagcagacaggtcgaagtgtcctgggagtaccctgatacctggtccacaccccacagctacttcagcctgaccttttgcgtgcaggtgcagggcaagagcaaaagggagaagaaggacagggtgtttaccgacaagacctccgccacagtgatttgcagaaagaacgcctccatcagcgtgagggcccaggacaggtattacagcagctcctggagcgaatgggctagcgtgccctgtagcggaggaggaggcagcggaggaggaggttctggaggaggcggcagcagaaacctgcctgtcgctacccccgaccccggaatgttcccctgcctgcaccactcccagaacctcctgagggccgtgtccaacatgctgcagaaggctagacagaccctcgaattctacccctgtaccagcgaggagatcgaccatgaggacatcaccaaggataagaccagcaccgtggaggcttgcctgcctctggagctgaccaaaaacgagagctgcctgaacagcagggaaaccagcttcattaccaacggctcctgcctggcctccaggaagacatccttcatgatggccctgtgcctcagcagcatctacgaggacctgaagatgtatcaggtggagtttaagaccatgaatgccaagctgctgatggaccctaagaggcagatcttcctggaccagaatatgctggccgtgattgacgagctgatgcaggccctcaactttaacagcgagaccgtgccccagaaaagcagcctcgaagagcctgacttctacaaaaccaagattaagctgtgtatcctgctgcacgccttcaggatcagggccgtgaccatcgacagggtgatgagctacctgaacgccagcggatcctcactggcgctcagccttactgccgaccaaatggtatcagctcttctggacgcagaacccccaattctttattccgagtacgaccccacacgcccgttcagtgaagcttccatgatgggcctccttacgaaccttgccgaccgggaactcgtgcacatgatcaattgggcgaagcgggtgccggggttcgtagatttgacacttcacgaccaagttcatctcttggaatgtgcttggatggagatattgatgatcggactcgtgtggaggtcaatggagcatcctggtaaacttcttttcgcacccaatctgctcttggatagaaatcagggtaagtgcgtcgagggtggcgttgaaatcttcgacatgctccttgcgacatccagccgattccgaatgatgaatcttcaaggagaggaatttgtctgtcttaagagcattatactcctcaatagtggagtttacaccttcttgtcctctacactgaaatcacttgaggaaaaagatcacatacatagggtgttggataaaatcacggatacactcatacatctgatggcaaaagcaggattgaccctgcaacagcagcacgcccgactggcccaactgctgttgatccttagccatatcagacacatgtctaacaaaaggatggaacatttgtacagcatgaaatgtaagaacgtagtgccactgtccgatttgttgctggaaatgctggacgctcatcggctctga

SEQ ID NO: 232 - protein, 787 aa, Artificial Sequence
  Description of Artificial Sequence: Synthetic Construct
MCHQQLVISWFSLVFLASPLVAIWELKKDVYVVELDWYPDAPGEMVVLTCDTPEEDGITWTLDQSSEVLGSGKTLTIQVKEFGDAGQYTCHKGGEVLSHSLLLLHKKEDGIWSTDILKDQKEPKNKTFLRCEAKNYSGRFTCWWLTTISTDLTFSVKSSRGSSDPQGVTCGAATLSAERVRGDNKEYEYSVECQEDSACPAAEESLPIEVMVDAVHKLKYENYTSSFFIRDIIKPDPPKNLQLKPLKNSRQVEVSWEYPDTWSTPHSYFSLTFCVQVQGKSKREKKDRVFTDKTSATVICRKNASISVRAQDRYYSSSWSEWASVPCSGGGGSGGGGSGGGGSRNLPVATPDPGMFPCLHHSQNLLRAVSNMLQKARQTLEFYPCTSEEIDHEDITKDKTSTVEACLPLELTKNESCLNSRETSFITNGSCLASRKTSFMMALCLSSIYEDLKMYQVEFKTMNAKLLMDPKRQIFLDQNMLAVIDELMQALNFNSETVPQKSSLEEPDFYKTKIKLCILLHAFRIRAVTIDRVMSYLNASGSSLALSLTADQMVSALLDAEPPILYSEYDPTRPFSEASMMGLLTNLADRELVHMINWAKRVPGFVDLTLHDQVHLLECAWMEILMIGLVWRSMEHPGKLLFAPNLLLDRNQGKCVEGGVEIFDMLLATSSRFRMMNLQGEEFVCLKSIILLNSGVYTFLSSTLKSLEEKDHIHRVLDKITDTLIHLMAKAGLTLQQQHDRLAQLLLILSHIRHMSNKRMEHLYSMKCKNVVPLSDLLLEMLDAHRL

SEQ ID NO: 233 - DNA, 2364 bp, Artificial Sequence
  Description of Artificial Sequence: Synthetic Construct
atgtgccaccaacagctcgtgatcagctggttctccctggtgttcctggctagccccctggtggccatctgggagctcaagaaagacgtgtacgtggtggaactggactggtaccccgacgcccctggcgaaatggtggtgctgacatgcgacacccctgaggaggatggcattacctggaccctcgatcagagctccgaggtgctgggcagcggcaaaaccctgaccatccaggtgaaggagtttggcgatgccggccagtacacatgtcacaagggcggcgaggtgctgagccactccctgctgctgctccacaagaaggaagatggcatctggagcaccgacattctgaaggatcagaaggagcccaagaacaagacattcctgaggtgtgaggccaagaactacagcggcaggtttacctgctggtggctgacaacaatcagcaccgacctcacattctccgtcaagtcctccaggggttcttccgaccctcaaggcgtgacatgcggcgctgccaccctgagcgctgagagagtcaggggcgacaacaaggagtacgagtacagcgtcgaatgtcaggaggacagcgcctgtcccgccgctgaagagagcctgcctatcgaggtgatggtggacgccgtgcacaaactgaagtatgagaattacacctccagcttcttcatcagggacatcatcaaacccgatccccccaagaacctgcagctgaagcctctgaagaacagcagacaggtcgaagtgtcctgggagtaccctgatacctggtccacaccccacagctacttcagcctgaccttttgcgtgcaggtgcagggcaagagcaaaagggagaagaaggacagggtgtttaccgacaagacctccgccacagtgatttgcagaaagaacgcctccatcagcgtgagggcccaggacaggtattacagcagctcctggagcgaatgggctagcgtgccctgtagcggaggaggaggcagcggaggaggaggttctggaggaggcggcagcagaaacctgcctgtcgctacccccgaccccggaatgttcccctgcctgcaccactcccagaacctcctgagggccgtgtccaacatgctgcagaaggctagacagaccctcgaattctacccctgtaccagcgaggagatcgaccatgaggacatcaccaaggataagaccagcaccgtggaggcttgcctgcctctggagctgaccaaaaacgagagctgcctgaacagcagggaaaccagcttcattaccaacggctcctgcctggcctccaggaagacatccttcatgatggccctgtgcctcagcagcatctacgaggacctgaagatgtatcaggtggagtttaagaccatgaatgccaagctgctgatggaccctaagaggcagatcttcctggaccagaatatgctggccgtgattgacgagctgatgcaggccctcaactttaacagcgagaccgtgccccagaaaagcagcctcgaagagcctgacttctacaaaaccaagattaagctgtgtatcctgctgcacgccttcaggatcagggccgtgaccatcgacagggtgatgagctacctgaacgccagcggatcctcactggcgctcagccttactgccgaccaaatggtatcagctcttctggacgcagaacccccaattctttattccgagtacgaccccacacgcccgttcagtgaagcttccatgatgggcctccttacgaaccttgccgaccgggaactcgtgcacatgatcaattgggcgaagcgggtgccggggttcgtagatttgacacttcacgaccaagttcatctcttggaatgtgcttggatggagatattgatgatcggactcgtgtggaggtcaatggagcatcctggtaaacttcttttcgcacccaatctgctcttggatagaaatcagggtaagtgcgtcgagggtggcgttgaaatcttcgacatgctccttgcgacatccagccgattccgaatgatgaatcttcaaggagaggaatttgtctgtcttaagagcattatactcctcaatagtggagtttacaccttcttgtcctctacactgaaatcacttgaggaaaaagatcacatacatagggtgttggataaaatcacggatacactcatacatctgatggcaaaagcaggattgaccctgcaacagcagcacgaccgactggcccaactgctgttgatccttagccatatcagacacatgtctaacaaaaggatggaacatttgtacagcatgaaatgtaagaacgtagtgccactgtccgatttgttgctggaaatgctggacgctcatcggctctga

SEQ ID NO: 234 - protein, 787 aa, Artificial Sequence
  Description of Artificial Sequence: Synthetic Construct
MCHQQLVISWFSLVFLASPLVAIWELKKDVYVVELDWYPDAPGEMVVLTCDTPEEDGITWTLDQSSEVLGSGKTLTIQVKEFGDAGQYTCHKGGEVLSHSLLLLHKKEDGIWSTDILKDQKEPKNKTFLRCEAKNYSGRFTCWWLTTISTDLTFSVKSSRGSSDPQGVTCGAATLSAERVRGDNKEYEYSVECQEDSACPAAEESLPIEVMVDAVHKLKYENYTSSFFIRDIIKPDPPKNLQLKPLKNSRQVEVSWEYPDTWSTPHSYFSLTFCVQVQGKSKREKKDRVFTDKTSATVICRKNASISVRAQDRYYSSSWSEWASVPCSGGGGSGGGGSGGGGSRNLPVATPDPGMFPCLHHSQNLLRAVSNMLQKARQTLEFYPCTSEEIDHEDITKDKTSTVEACLPLELTKNESCLNSRETSFITNGSCLASRKTSFMMALCLSSIYEDLKMYQVEFKTMNAKLLMDPKRQIFLDQNMLAVIDELMQALNFNSETVPQKSSLEEPDFYKTKIKLCILLHAFRIRAVTIDRVMSYLNASGSSLALSLTADQMVSALLDAEPPILYSEYDPTRPFSEASMMGLLTNLADRELVHMINWAKRVPGFVDLTLHDQVHLLECAWMEILMIGLVWRSMEHPGKLLFAPNLLLDRNQGKCVEGGVEIFDMLLATSSRFRMMNLQGEEFVCLKSIILLNSGVYTFLSSTLKSLEEKDHIHRVLDKITDTLIHLMAKAGLTLQQQHERLAQLLLILSHIRHMSNKRMEHLYSMKCKNVVPLSDLLLEMLDAHRL

SEQ ID NO: 235 - DNA, 2364 bp, Artificial Sequence
  Description of Artificial Sequence: Synthetic Construct
atgtgccaccaacagctcgtgatcagctggttctccctggtgttcctggctagccccctggtggccatctgggagctcaagaaagacgtgtacgtggtggaactggactggtaccccgacgcccctggcgaaatggtggtgctgacatgcgacacccctgaggaggatggcattacctggaccctcgatcagagctccgaggtgctgggcagcggcaaaaccctgaccatccaggtgaaggagtttggcgatgccggccagtacacatgtcacaagggcggcgaggtgctgagccactccctgctgctgctccacaagaaggaagatggcatctggagcaccgacattctgaaggatcagaaggagcccaagaacaagacattcctgaggtgtgaggccaagaactacagcggcaggtttacctgctggtggctgacaacaatcagcaccgacctcacattctccgtcaagtcctccaggggttcttccgaccctcaaggcgtgacatgcggcgctgccaccctgagcgctgagagagtcaggggcgacaacaaggagtacgagtacagcgtcgaatgtcaggaggacagcgcctgtcccgccgctgaagagagcctgcctatcgaggtgatggtggacgccgtgcacaaactgaagtatgagaattacacctccagcttcttcatcagggacatcatcaaacccgatccccccaagaacctgcagctgaagcctctgaagaacagcagacaggtcgaagtgtcctgggagtaccctgatacctggtccacaccccacagctacttcagcctgaccttttgcgtgcaggtgcagggcaagagcaaaagggagaagaaggacagggtgtttaccgacaagacctccgccacagtgatttgcagaaagaacgcctccatcagcgtgagggcccaggacaggtattacagcagctcctggagcgaatgggctagcgtgccctgtagcggaggaggaggcagcggaggaggaggttctggaggaggcggcagcagaaacctgcctgtcgctacccccgaccccggaatgttcccctgcctgcaccactcccagaacctcctgagggccgtgtccaacatgctgcagaaggctagacagaccctcgaattctacccctgtaccagcgaggagatcgaccatgaggacatcaccaaggataagaccagcaccgtggaggcttgcctgcctctggagctgaccaaaaacgagagctgcctgaacagcagggaaaccagcttcattaccaacggctcctgcctggcctccaggaagacatccttcatgatggccctgtgcctcagcagcatctacgaggacctgaagatgtatcaggtggagtttaagaccatgaatgccaagctgctgatggaccctaagaggcagatcttcctggaccagaatatgctggccgtgattgacgagctgatgcaggccctcaactttaacagcgagaccgtgccccagaaaagcagcctcgaagagcctgacttctacaaaaccaagattaagctgtgtatcctgctgcacgccttcaggatcagggccgtgaccatcgacagggtgatgagctacctgaacgccagcggatcctcactggcgctcagccttactgccgaccaaatggtatcagctcttctggacgcagaacccccaattctttattccgagtacgaccccacacgcccgttcagtgaagcttccatgatgggcctccttacgaaccttgccgaccgggaactcgtgcacatgatcaattgggcgaagcgggtgccggggttcgtagatttgacacttcacgaccaagttcatctcttggaatgtgcttggatggagatattgatgatcggactcgtgtggaggtcaatggagcatcctggtaaacttcttttcgcacccaatctgctcttggatagaaatcagggtaagtgcgtcgagggtggcgttgaaatcttcgacatgctccttgcgacatccagccgattccgaatgatgaatcttcaaggagaggaatttgtctgtcttaagagcattatactcctcaatagtggagtttacaccttcttgtcctctacactgaaatcacttgaggaaaaagatcacatacatagggtgttggataaaatcacggatacactcatacatctgatggcaaaagcaggattgaccctgcaacagcagcacgagcgactggcccaactgctgttgatccttagccatatcagacacatgtctaacaaaaggatggaacatttgtacagcatgaaatgtaagaacgtagtgccactgtccgatttgttgctggaaatgctggacgctcatcggctctga

SEQ ID NO: 236 - protein, 787 aa, Artificial Sequence
  Description of Artificial Sequence: Synthetic Construct
MCHQQLVISWFSLVFLASPLVAIWELKKDVYVVELDWYPDAPGEMVVLTCDTPEEDGITWTLDQSSEVLGSGKTLTIQVKEFGDAGQYTCHKGGEVLSHSLLLLHKKEDGIWSTDILKDQKEPKNKTFLRCEAKNYSGRFTCWWLTTISTDLTFSVKSSRGSSDPQGVTCGAATLSAERVRGDNKEYEYSVECQEDSACPAAEESLPIEVMVDAVHKLKYENYTSSFFIRDIIKPDPPKNLQLKPLKNSRQVEVSWEYPDTWSTPHSYFSLTFCVQVQGKSKREKKDRVFTDKTSATVICRKNASISVRAQDRYYSSSWSEWASVPCSGGGGSGGGGSGGGGSRNLPVATPDPGMFPCLHHSQNLLRAVSNMLQKARQTLEFYPCTSEEIDHEDITKDKTSTVEACLPLELTKNESCLNSRETSFITNGSCLASRKTSFMMALCLSSIYEDLKMYQVEFKTMNAKLLMDPKRQIFLDQNMLAVIDELMQALNFNSETVPQKSSLEEPDFYKTKIKLCILLHAFRIRAVTIDRVMSYLNASGSSLALSLTADQMVSALLDAEPPILYSEYDPTRPFSEASMMGLLTNLADRELVHMINWAKRVPGFVDLTLHDQVHLLECAWMEILMIGLVWRSMEHPGKLLFAPNLLLDRNQGKCVEGGVEIFDMLLATSSRFRMMNLQGEEFVCLKSIILLNSGVYTFLSSTLKSLEEKDHIHRVLDKITDTLIHLMAKAGLTLQQQHGRLAQLLLILSHIRHMSNKRMEHLYSMKCKNVVPLSDLLLEMLDAHRL

SEQ ID NO: 237 - DNA, 2364 bp, Artificial Sequence
  Description of Artificial Sequence: Synthetic Construct
atgtgccaccaacagctcgtgatcagctggttctccctggtgttcctggctagccccctggtggccatctgggagctcaagaaagacgtgtacgtggtggaactggactggtaccccgacgcccctggcgaaatggtggtgctgacatgcgacacccctgaggaggatggcattacctggaccctcgatcagagctccgaggtgctgggcagcggcaaaaccctgaccatccaggtgaaggagtttggcgatgccggccagtacacatgtcacaagggcggcgaggtgctgagccactccctgctgctgctccacaagaaggaagatggcatctggagcaccgacattctgaaggatcagaaggagcccaagaacaagacattcctgaggtgtgaggccaagaactacagcggcaggtttacctgctggtggctgacaacaatcagcaccgacctcacattctccgtcaagtcctccaggggttcttccgaccctcaaggcgtgacatgcggcgctgccaccctgagcgctgagagagtcaggggcgacaacaaggagtacgagtacagcgtcgaatgtcaggaggacagcgcctgtcccgccgctgaagagagcctgcctatcgaggtgatggtggacgccgtgcacaaactgaagtatgagaattacacctccagcttcttcatcagggacatcatcaaacccgatccccccaagaacctgcagctgaagcctctgaagaacagcagacaggtcgaagtgtcctgggagtaccctgatacctggtccacaccccacagctacttcagcctgaccttttgcgtgcaggtgcagggcaagagcaaaagggagaagaaggacagggtgtttaccgacaagacctccgccacagtgatttgcagaaagaacgcctccatcagcgtgagggcccaggacaggtattacagcagctcctggagcgaatgggctagcgtgccctgtagcggaggaggaggcagcggaggaggaggttctggaggaggcggcagcagaaacctgcctgtcgctacccccgaccccggaatgttcccctgcctgcaccactcccagaacctcctgagggccgtgtccaacatgctgcagaaggctagacagaccctcgaattctacccctgtaccagcgaggagatcgaccatgaggacatcaccaaggataagaccagcaccgtggaggcttgcctgcctctggagctgaccaaaaacgagagctgcctgaacagcagggaaaccagcttcattaccaacggctcctgcctggcctccaggaagacatccttcatgatggccctgtgcctcagcagcatctacgaggacctgaagatgtatcaggtggagtttaagaccatgaatgccaagctgctgatggaccctaagaggcagatcttcctggaccagaatatgctggccgtgattgacgagctgatgcaggccctcaactttaacagcgagaccgtgccccagaaaagcagcctcgaagagcctgacttctacaaaaccaagattaagctgtgtatcctgctgcacgccttcaggatcagggccgtgaccatcgacagggtgatgagctacctgaacgccagcggatcctcactggcgctcagccttactgccgaccaaatggtatcagctcttctggacgcagaacccccaattctttattccgagtacgaccccacacgcccgttcagtgaagcttccatgatgggcctccttacgaaccttgccgaccgggaactcgtgcacatgatcaattgggcgaagcgggtgccggggttcgtagatttgacacttcacgaccaagttcatctcttggaatgtgcttggatggagatattgatgatcggactcgtgtggaggtcaatggagcatcctggtaaacttcttttcgcgcccaatctgctcttggatagaaatcagggtaagtgcgtcgagggtggcgttgaaatcttcgacatgctccttgcgacatccagccgattccgaatgatgaatcttcaaggagaggaatttgtctgtcttaagagcattatactcctcaatagtggagtttacaccttcttgtcctctacactgaaatcacttgaggaaaaagatcacatacatagggtgttggataaaatcacggatacactcatacatctgatggcaaaagcaggattgaccctgcaacagcagcacggccgactggcccaactgctgttgatccttagccatatcagacacatgtctaacaaaaggatggaacatttgtacagcatgaaatgtaagaacgtagtgccactgtccgatttgttgctggaaatgctggacgctcatcggctctga

SEQ ID NO: 238 - protein, 787 aa, Artificial Sequence; identical to SEQ ID NO: 142
  Description of Artificial Sequence: Synthetic Construct

SEQ ID NO: 239 - DNA, 2364 bp, Artificial Sequence
  Description of Artificial Sequence: Synthetic Construct
atgtgccaccaacagctcgtgatcagctggttctccctggtgttcctggctagccccctggtggccatctgggagctcaagaaagacgtgtacgtggtggaactggactggtaccccgacgcccctggcgaaatggtggtgctgacatgcgacacccctgaggaggatggcattacctggaccctcgatcagagctccgaggtgctgggcagcggcaaaaccctgaccatccaggtgaaggagtttggcgatgccggccagtacacatgtcacaagggcggcgaggtgctgagccactccctgctgctgctccacaagaaggaagatggcatctggagcaccgacattctgaaggatcagaaggagcccaagaacaagacattcctgaggtgtgaggccaagaactacagcggcaggtttacctgctggtggctgacaacaatcagcaccgacctcacattctccgtcaagtcctccaggggttcttccgaccctcaaggcgtgacatgcggcgctgccaccctgagcgctgagagagtcaggggcgacaacaaggagtacgagtacagcgtcgaatgtcaggaggacagcgcctgtcccgccgctgaagagagcctgcctatcgaggtgatggtggacgccgtgcacaaactgaagtatgagaattacacctccagcttcttcatcagggacatcatcaaacccgatccccccaagaacctgcagctgaagcctctgaagaacagcagacaggtcgaagtgtcctgggagtaccctgatacctggtccacaccccacagctacttcagcctgaccttttgcgtgcaggtgcagggcaagagcaaaagggagaagaaggacagggtgtttaccgacaagacctccgccacagtgatttgcagaaagaacgcctccatcagcgtgagggcccaggacaggtattacagcagctcctggagcgaatgggctagcgtgccctgtagcggaggaggaggcagcggaggaggaggttctggaggaggcggcagcagaaacctgcctgtcgctacccccgaccccggaatgttcccctgcctgcaccactcccagaacctcctgagggccgtgtccaacatgctgcagaaggctagacagaccctcgaattctacccctgtaccagcgaggagatcgaccatgaggacatcaccaaggataagaccagcaccgtggaggcttgcctgcctctggagctgaccaaaaacgagagctgcctgaacagcagggaaaccagcttcattaccaacggctcctgcctggcctccaggaagacatccttcatgatggccctgtgcctcagcagcatctacgaggacctgaagatgtatcaggtggagtttaagaccatgaatgccaagctgctgatggaccctaagaggcagatcttcctggaccagaatatgctggccgtgattgacgagctgatgcaggccctcaactttaacagcgagaccgtgccccagaaaagcagcctcgaagagcctgacttctacaaaaccaagattaagctgtgtatcctgctgcacgccttcaggatcagggccgtgaccatcgacagggtgatgagctacctgaacgccagcggatcctcactggcgctcagccttactgccgaccaaatggtatcagctcttctggacgcagaacccccaattctttattccgagtacgaccccacacgcccgttcagtgaagcttccatgatgggcctccttacgaaccttgccgaccgggaactcgtgcacatgatcaattgggcgaagcgggtgccggggttcgtagatttgacacttcacgaccaagttcatctcttggaatgtgcttggatggagatattgatgatcggactcgtgtggaggtcaatggagcatcctggtaaacttcttttcgcacccaatctgctcttggatagaaatcagggtaagtgcgtcgagggtggcgttgaaatcttcgacatgctccttgcgacatccagccgattccgaatgatgaatcttcaaggagaggaatttgtctgtcttaagagcattatactcctcaatagtggagtttacaccttcttgtcctctacactgaaatcacttgaggaaaaagatcacatacatagggtgttggataaaatcacggatacactcatacatctgatggcaaaagcaggattgaccctgcaacagcagcaccgacgactggcccaactgctgttgatccttagccatatcagacacatgtctaacaaaaggatggaacatttgtacagcatgaaatgtaagaacgtagtgccactgtccgatttgttgctggaaatgctggacgctcatcggctctga

SEQ ID NO: 240 - protein, 791 aa, Artificial Sequence
  Description of Artificial Sequence: Synthetic Construct
MCHQQLVISWFSLVFLASPLVAGSSLALSLTADQMVSALLDAEPPILYSEYDPTRPFSEASMMGLLTNLADRELVHMINWAKRVPGFVDLALHDQVHLLECAWMEILMIGLVWRSMEHPGKLLFAPNLLLDRNQGKCVEGGVEIFDMLLATSSRFRMMNLQGEEFVCLKSIILLNSGVYTFLSSTLKSLEEKDHIHRVLDKITDTLIHLMAKAGLTLQQQHQRLAQLLLILSHIRHMSSKRMEHLYSMKCKNVVPLSDLLLEMLDAHRLRTKRIWELKKDVYVVELDWYPDAPGEMVVLTCDTPEEDGITWTLDQSSEVLGSGKTLTIQVKEFGDAGQYTCHKGGEVLSHSLLLLHKKEDGIWSTDILKDQKEPKNKTFLRCEAKNYSGRFTCWWLTTISTDLTFSVKSSRGSSDPQGVTCGAATLSAERVRGDNKEYEYSVECQEDSACPAAEESLPIEVMVDAVHKLKYENYTSSFFIRDIIKPDPPKNLQLKPLKNSRQVEVSWEYPDTWSTPHSYFSLTFCVQVQGKSKREKKDRVFTDKTSATVICRKNASISVRAQDRYYSSSWSEWASVPCSGGGGSGGGGSGGGGSRNLPVATPDPGMFPCLHHSQNLLRAVSNMLQKARQTLEFYPCTSEEIDHEDITKDKTSTVEACLPLELTKNESCLNSRETSFITNGSCLASRKTSFMMALCLSSIYEDLKMYQVEFKTMNAKLLMDPKRQIFLDQNMLAVIDELMQALNFNSETVPQKSSLEEPDFYKTKIKLCILLHAFRIRAVTIDRVMSYLNAS

SEQ ID NO: 241 - DNA, 2376 bp, Artificial Sequence
  Description of Artificial Sequence: Synthetic Construct
atgtgccaccaacagctcgtgatcagctggttctccctggtgttcctggctagccccctggtggccggatcatcactggcgctcagccttactgccgaccaaatggtatcagctcttctggacgcagaacccccaattctttattccgagtacgaccccacacgcccgttcagtgaagcttccatgatgggcctccttacgaaccttgccgaccgggaactcgtgcacatgatcaattgggcgaagcgggtgccggggttcgtagatttggcacttcacgaccaagttcatctcttggaatgtgcttggatggagatattgatgatcggactcgtgtggaggtcaatggagcatcctggtaaacttcttttcgcacccaatctgctcttggatagaaatcagggtaagtgcgtcgagggtggcgttgaaatcttcgacatgctccttgcgacatccagccgattccgaatgatgaatcttcaaggagaggaatttgtctgtcttaagagcattatactcctcaatagtggagtttacaccttcttgtcctctacactgaaatcacttgaggaaaaagatcacatacatagggtgttggataaaatcacggatacactcatacatctgatggcaaaagcaggattgaccctgcaacagcagcaccaacgactggcccaactgctgttgatccttagccatatcagacacatgtctagcaaaaggatggaacatttgtacagcatgaaatgtaagaacgtagtgccactgtccgatttgttgctggaaatgctggacgctcatcggctcagaacgaagagaatctgggagctcaagaaagacgtgtacgtggtggaactggactggtaccccgacgcccctggcgaaatggtggtgctgacatgcgacacccctgaggaggatggcattacctggaccctcgatcagagctccgaggtgctgggcagcggcaaaaccctgaccatccaggtgaaggagtttggcgatgccggccagtacacatgtcacaagggcggcgaggtgctgagccactccctgctgctgctccacaagaaggaagatggcatctggagcaccgacattctgaaggatcagaaggagcccaagaacaagacattcctgaggtgtgaggccaagaactacagcggcaggtttacctgctggtggctgacaacaatcagcaccgacctcacattctccgtcaagtcctccaggggttcttccgaccctcaaggcgtgacatgcggcgctgccaccctgagcgctgagagagtcaggggcgacaacaaggagtacgagtacagcgtcgaatgtcaggaggacagcgcctgtcccgccgctgaagagagcctgcctatcgaggtgatggtggacgccgtgcacaaactgaagtatgagaattacacctccagcttcttcatcagggacatcatcaaacccgatccccccaagaacctgcagctgaagcctctgaagaacagcagacaggtcgaagtgtcctgggagtaccctgatacctggtccacaccccacagctacttcagcctgaccttttgcgtgcaggtgcagggcaagagcaaaagggagaagaaggacagggtgtttaccgacaagacctccgccacagtgatttgcagaaagaacgcctccatcagcgtgagggcccaggacaggtattacagcagctcctggagcgaatgggctagcgtgccctgtagcggaggaggaggcagcggaggaggaggttctggaggaggcggcagcagaaacctgcctgtcgctacccccgaccccggaatgttcccctgcctgcaccactcccagaacctcctgagggccgtgtccaacatgctgcagaaggctagacagaccctcgaattctacccctgtaccagcgaggagatcgaccatgaggacatcaccaaggataagaccagcaccgtggaggcttgcctgcctctggagctgaccaaaaacgagagctgcctgaacagcagggaaaccagcttcattaccaacggctcctgcctggcctccaggaagacatccttcatgatggccctgtgcctcagcagcatctacgaggacctgaagatgtatcaggtggagtttaagaccatgaatgccaagctgctgatggaccctaagaggcagatcttcctggaccagaatatgctggccgtgattgacgagctgatgcaggccctcaactttaacagcgagaccgtgccccagaaaagcagcctcgaagagcctgacttctacaaaaccaagattaagctgtgtatcctgctgcacgccttcaggatcagggccgtgaccatcgacagggtgatgagctacctgaacgcctcctaa

SEQ ID NO: 242 - protein, 799 aa, Artificial Sequence
  Description of Artificial Sequence: Synthetic Construct
MCHQQLVISWFSLVFLASPLVAGSSLALSLTADQMVSALLDAEPPILYSEYDPTRPFSEASMMGLLTNLADRELVHMINWAKRVPGFVDLALHDQVHLLECAWMEILMIGLVWRSMEHPGKLLFAPNLLLDRNQGKCVEGGVEIFDMLLATSSRFRMMNLQGEEFVCLKSIILLNSGVYTFLSSTLKSLEEKDHIHRVLDKITDTLIHLMAKAGLTLQQQHQRLAQLLLILSHIRHMSSKRMEHLYSMKCKNVVPLSDLLLEMLDAHRLESRRVRRNKRSKIWELKKDVYVVELDWYPDAPGEMVVLTCDTPEEDGITWTLDQSSEVLGSGKTLTIQVKEFGDAGQYTCHKGGEVLSHSLLLLHKKEDGIWSTDILKDQKEPKNKTFLRCEAKNYSGRFTCWWLTTISTDLTFSVKSSRGSSDPQGVTCGAATLSAERVRGDNKEYEYSVECQEDSACPAAEESLPIEVMVDAVHKLKYENYTSSFFIRDIIKPDPPKNLQLKPLKNSRQVEVSWEYPDTWSTPHSYFSLTFCVQVQGKSKREKKDRVFTDKTSATVICRKNASISVRAQDRYYSSSWSEWASVPCSGGGGSGGGGSGGGGSRNLPVATPDPGMFPCLHHSQNLLRAVSNMLQKARQTLEFYPCTSEEIDHEDITKDKTSTVEACLPLELTKNESCLNSRETSFITNGSCLASRKTSFMMALCLSSIYEDLKMYQVEFKTMNAKLLMDPKRQIFLDQNMLAVIDELMQALNFNSETVPQKSSLEEPDFYKTKIKLCILLHAFRIRAVTIDRVMSYLNAS

SEQ ID NO: 243 - DNA, 2400 bp, Artificial Sequence
  Description of Artificial Sequence: Synthetic Construct
atgtgccaccaacagctcgtgatcagctggttctccctggtgttcctggctagccccctggtggccggatcatcactggcgctcagccttactgccgaccaaatggtatcagctcttctggacgcagaacccccaattctttattccgagtacgaccccacacgcccgttcagtgaagcttccatgatgggcctccttacgaaccttgccgaccgggaactcgtgcacatgatcaattgggcgaagcgggtgccggggttcgtagatttggcacttcacgaccaagttcatctcttggaatgtgcttggatggagatattgatgatcggactcgtgtggaggtcaatggagcatcctggtaaacttcttttcgcacccaatctgctcttggatagaaatcagggtaagtgcgtcgagggtggcgttgaaatcttcgacatgctccttgcgacatccagccgattccgaatgatgaatcttcaaggagaggaatttgtctgtcttaagagcattatactcctcaatagtggagtttacaccttcttgtcctctacactgaaatcacttgaggaaaaagatcacatacatagggtgttggataaaatcacggatacactcatacatctgatggcaaaagcaggattgaccctgcaacagcagcaccaacgactggcccaactgctgttgatccttagccatatcagacacatgtctagcaaaaggatggaacatttgtacagcatgaaatgtaagaacgtagtgccactgtccgatttgttgctggaaatgctggacgctcatcggctcgagtccaggagagtgcggcgcaacaagaggagcaagatctgggagctcaagaaagacgtgtacgtggtggaactggactggtaccccgacgcccctggcgaaatggtggtgctgacatgcgacacccctgaggaggatggcattacctggaccctcgatcagagctccgaggtgctgggcagcggcaaaaccctgaccatccaggtgaaggagtttggcgatgccggccagtacacatgtcacaagggcggcgaggtgctgagccactccctgctgctgctccacaagaaggaagatggcatctggagcaccgacattctgaaggatcagaaggagcccaagaacaagacattcctgaggtgtgaggccaagaactacagcggcaggtttacctgctggtggctgacaacaatcagcaccgacctcacattctccgtcaagtcctccaggggttcttccgaccctcaaggcgtgacatgcggcgctgccaccctgagcgctgagagagtcaggggcgacaacaaggagtacgagtacagcgtcgaatgtcaggaggacagcgcctgtcccgccgctgaagagagcctgcctatcgaggtgatggtggacgccgtgcacaaactgaagtatgagaattacacctccagcttcttcatcagggacatcatcaaacccgatccccccaagaacctgcagctgaagcctctgaagaacagcagacaggtcgaagtgtcctgggagtaccctgatacctggtccacaccccacagctacttcagcctgaccttttgcgtgcaggtgcagggcaagagcaaaagggagaagaaggacagggtgtttaccgacaagacctccgccacagtgatttgcagaaagaacgcctccatcagcgtgagggcccaggacaggtattacagcagctcctggagcgaatgggctagcgtgccctgtagcggaggaggaggcagcggaggaggaggttctggaggaggcggcagcagaaacctgcctgtcgctacccccgaccccggaatgttcccctgcctgcaccactcccagaacctcctgagggccgtgtccaacatgctgcagaaggctagacagaccctcgaattctacccctgtaccagcgaggagatcgaccatgaggacatcaccaaggataagaccagcaccgtggaggcttgcctgcctctggagctgaccaaaaacgagagctgcctgaacagcagggaaaccagcttcattaccaacggctcctgcctggcctccaggaagacatccttcatgatggccctgtgcctcagcagcatctacgaggacctgaagatgtatcaggtggagtttaagaccatgaatgccaagctgctgatggaccctaagaggcagatcttcctggaccagaatatgctggccgtgattgacgagctgatgcaggccctcaactttaacagcgagaccgtgccccagaaaagcagcctcgaagagcctgacttctacaaaaccaagattaagctgtgtatcctgctgcacgccttcaggatcagggccgtgaccatcgacagggtgatgagctacctgaacgcctcctaa

SEQ ID NO: 244 - protein, 18 aa, Artificial Sequence
  Description of Artificial Sequence: Synthetic Signal Sequence
MDWTWILFLVAAATRVHS

SEQ ID NO: 245 - DNA, 54 bp, Artificial Sequence
  Description of Artificial Sequence: Synthetic Signal Sequence
atggactggacatggatactcttcctggtagcagccgccacacgagtgcacagc

SEQ ID NO: 246 - protein, 114 aa, Artificial Sequence
  Description of Artificial Sequence: Synthetic Payload sequence
NWVNVISDLKKIEDLIQSMHIDATLYTESDVHPSCKVTAMKCFLLELQVISLESGDASIHDTVENLIILANNSLSSNGNVTESGCKECEELEEKNIKEFLQSFVHIVQMFINTS

SEQ ID NO: 247 - DNA, 342 bp, Artificial Sequence
  Description of Artificial Sequence: Synthetic Payload sequence
aactgggtgaacgtgatctccgacctgaaaaagatcgaggatttgatccagagcatgcacattgacgccaccctgtataccgagtccgacgtgcacccgagttgcaaggtgactgccatgaagtgcttcctgctggagctgcaagtgatcagcctggagagcggcgacgccagcatccacgacaccgtggaaaaccttatcattctggccaacaatagcctgagcagcaacggcaacgtgaccgaaagcggatgtaaggaatgcgaggaactggaagagaagaatatcaaagaattcctgcaaagcttcgtgcacatcgtgcagatgttcatcaacacttct

SEQ ID NO: 248 - protein, 237 aa, Artificial Sequence
  Description of Artificial Sequence: Synthetic Payload sequence
ITCPPPMSVEHADIWVKSYSLYSRERYICNSGFKRKAGTSSLTECVLNKATNVAHWTTPSLKCIRDPALVHQRPAPPSTVTTAGVTPQPESLSPSGKEPAASSPSSNNTAATTAAIVPGSQLMPSKSPSTGTTEISSHESSHGTPSQTTAKNWELTASASHQPPGVYPQGHSDTTVAISTSTVLLCGLSAVSLLACYLKSRQTPPLASVEMEAMEALPVTWGTSSRDEDLENCSHHL

SEQ ID NO: 249 - DNA, 711 bp, Artificial Sequence
  Description of Artificial Sequence: Synthetic Payload sequence
attacctgcccccctccgatgagcgtggagcacgccgacatctgggtcaagagctacagcttgtatagtagggagcggtacatctgtaacagcgggttcaagaggaaggccgggaccagctcactgaccgagtgcgtgttgaacaaggccaccaacgtggcccactggaccacccctagccttaagtgcatcagggacccagcgctcgtacaccagagacccgcgcctccctctacggtaaccacggcaggcgtaaccccccagcccgagagcctgtccccgagcggcaaggagcctgcagcgagcagcccctcaagcaacaacacagccgctaccaccgcggcaatcgtgcccggcagccagctgatgccctcaaagagccccagcaccggcaccactgagataagcagccacgagagctcacacggcactccctcacagaccactgccaagaattgggagctgaccgcctctgccagccaccagcccccaggcgtgtatccccagggccacagcgacaccacggtcgccatcagcacatctacagtgcttttgtgcggccttagcgccgtgtcactgctggcatgctacttgaaaagtaggcaaactccccctcttgccagtgtggaaatggaggccatggaagccctgcccgtgacctggggcaccagttctagggacgaggaccttgagaactgctcacatcatttg

SEQ ID NO: 250 - protein, 26 aa, Artificial Sequence
  Description of Artificial Sequence: Synthetic Linker
SGGGSGGGGSGGGGSGGGGSGGGSLQ

SEQ ID NO: 251 - DNA, 78 bp, Artificial Sequence
  Description of Artificial Sequence: Synthetic Linker
tcaggtggcggtagtggtgggggaggatctggaggcggaggaagcgggggtggaggttcaggaggagggagcttgcaa

SEQ ID NO: 252 - protein, 642 aa, Artificial Sequence
  Description of Artificial Sequence: Synthetic Construct
MDWTWILFLVAAATRVHSNWVNVISDLKKIEDLIQSMHIDATLYTESDVHPSCKVTAMKCFLLELQVISLESGDASIHDTVENLIILANNSLSSNGNVTESGCKECEELEEKNIKEFLQSFVHIVQMFINTSSGGGSGGGGSGGGGSGGGGSGGGSLQITCPPPMSVEHADIWVKSYSLYSRERYICNSGFKRKAGTSSLTECVLNKATNVAHWTTPSLKCIRDPALVHQRPAPPSTVTTAGVTPQPESLSPSGKEPAASSPSSNNTAATTAAIVPGSQLMPSKSPSTGTTEISSHESSHGTPSQTTAKNWELTASASHQPPGVYPQGHSDTTVAISTSTVLLCGLSAVSLLACYLKSRQTPPLASVEMEAMEALPVTWGTSSRDEDLENCSHHLGSSLALSLTADQMVSALLDAEPPILYSEYDPTGPFSEASMMGLLTNLADRELVHMINWAKRVPGFVDLTLHDQVHLLECAWMEILMIGLVWRSMEHPGKLLFAPNLLLDRNQGKCVEGGVEIFDMLLATSSRFRMMNLQGEEFVCLKSIILLNSGVYTFLSSTLKSLEEKDHIHRVLDKITDTLIHLMAKAGLTLQQQHQRLAQLLLILSHIRHMSNKRMGHLYSMKCKNVVPLSDLLLEMLDTHRL

SEQ ID NO: 253 - DNA, 1929 bp, Artificial Sequence
  Description of Artificial Sequence: Synthetic Construct
atggactggacatggatactcttcctggtagcagccgccacacgagtgcacagcaactgggtgaacgtgatctccgacctgaaaaagatcgaggatttgatccagagcatgcacattgacgccaccctgtataccgagtccgacgtgcacccgagttgcaaggtgactgccatgaagtgcttcctgctggagctgcaagtgatcagcctggagagcggcgacgccagcatccacgacaccgtggaaaaccttatcattctggccaacaatagcctgagcagcaacggcaacgtgaccgaaagcggatgtaaggaatgcgaggaactggaagagaagaatatcaaagaattcctgcaaagcttcgtgcacatcgtgcagatgttcatcaacacttcttcaggtggcggtagtggtgggggaggatctggaggcggaggaagcgggggtggaggttcaggaggagggagcttgcaaattacctgcccccctccgatgagcgtggagcacgccgacatctgggtcaagagctacagcttgtatagtagggagcggtacatctgtaacagcgggttcaagaggaaggccgggaccagctcactgaccgagtgcgtgttgaacaaggccaccaacgtggcccactggaccacccctagccttaagtgcatcagggacccagcgctcgtacaccagagacccgcgcctccctctacggtaaccacggcaggcgtaaccccccagcccgagagcctgtccccgagcggcaaggagcctgcagcgagcagcccctcaagcaacaacacagccgctaccaccgcggcaatcgtgcccggcagccagctgatgccctcaaagagccccagcaccggcaccactgagataagcagccacgagagctcacacggcactccctcacagaccactgccaagaattgggagctgaccgcctctgccagccaccagcccccaggcgtgtatccccagggccacagcgacaccacggtcgccatcagcacatctacagtgcttttgtgcggccttagcgccgtgtcactgctggcatgctacttgaaaagtaggcaaactccccctcttgccagtgtggaaatggaggccatggaagccctgcccgtgacctggggcaccagttctagggacgaggaccttgagaactgctcacatcatttgggatcctcactggcgctcagccttactgccgaccaaatggtatcagctcttctggacgcagaacccccaattctttattccgagtacgaccccacaggcccgttcagtgaagcttccatgatgggcctccttacgaaccttgccgaccgggaactcgtgcacatgatcaattgggcgaagcgggtgccggggttcgtagatttgacacttcacgaccaagttcatctcttggaatgtgcttggatggagatattgatgatcggactcgtgtggaggtcaatggagcatcctggtaaacttcttttcgcacccaatctgctcttggatagaaatcagggtaagtgcgtcgagggtggcgttgaaatcttcgacatgctccttgcgacatccagccgattccgaatgatgaatcttcaaggagaggaatttgtctgtcttaagagcattatactcctcaatagtggagtttacaccttcttgtcctctacactgaaatcacttgaggaaaaagatcacatacatagggtgttggataaaatcacggatacactcatacatctgatggcaaaagcaggattgaccctgcaacagcagcaccaacgactggcccaactgctgttgatccttagccatatcagacacatgtctaacaaaaggatgggacatttgtacagcatgaaatgtaagaacgtagtgccactgtccgatttgttgctggaaatgctggacactcatcggctctaa

SEQ ID NO: 254 - protein, 642 aa, Artificial Sequence
  Description of Artificial Sequence: Synthetic Construct
MDWTWILFLVAAATRVHSNWVNVISDLKKIEDLIQSMHIDATLYTESDVHPSCKVTAMKCFLLELQVISLESGDASIHDTVENLIILANNSLSSNGNVTESGCKECEELEEKNIKEFLQSFVHIVQMFINTSSGGGSGGGGSGGGGSGGGGSGGGSLQITCPPPMSVEHADIWVKSYSLYSRERYICNSGFKRKAGTSSLTECVLNKATNVAHWTTPSLKCIRDPALVHQRPAPPSTVTTAGVTPQPESLSPSGKEPAASSPSSNNTAATTAAIVPGSQLMPSKSPSTGTTEISSHESSHGTPSQTTAKNWELTASASHQPPGVYPQGHSDTTVAISTSTVLLCGLSAVSLLACYLKSRQTPPLASVEMEAMEALPVTWGTSSRDEDLENCSHHLGSSLALSLTADQMVSALLDAEPPILYSEYDPTRPFSEASMMGLLTNLADRELVHMINWAKRVPGFVDLTLHDQVHLLECAWMEILMIGLVWRSMEHPGKLLFAPNLLLDRNQGKCVEGGVEIFDMLLAISSRFRMMNLQGEEFVCLKSIILLNSGVYTFLSSTLKSLEEKDHIHRVLDKITDTLIHLMAKAGLTLQQQHQRLAQLLLILSHIRHMSNKRMEHLYSMKCKNVVPLSDLLLEMLDAHRL

SEQ ID NO: 255 - DNA, 1929 bp, Artificial Sequence
  Description of Artificial Sequence: Synthetic Construct
atggactggacatggatactcttcctggtagcagccgccacacgagtgcacagcaactgggtgaacgtgatctccgacctgaaaaagatcgaggatttgatccagagcatgcacattgacgccaccctgtataccgagtccgacgtgcacccgagttgcaaggtgactgccatgaagtgcttcctgctggagctgcaagtgatcagcctggagagcggcgacgccagcatccacgacaccgtggaaaaccttatcattctggccaacaatagcctgagcagcaacggcaacgtgaccgaaagcggatgtaaggaatgcgaggaactggaagagaagaatatcaaagaattcctgcaaagcttcgtgcacatcgtgcagatgttcatcaacacttcttcaggtggcggtagtggtgggggaggatctggaggcggaggaagcgggggtggaggttcaggaggagggagcttgcaaattacctgcccccctccgatgagcgtggagcacgccgacatctgggtcaagagctacagcttgtatagtagggagcggtacatctgtaacagcgggttcaagaggaaggccgggaccagctcactgaccgagtgcgtgttgaacaaggccaccaacgtggcccactggaccacccctagccttaagtgcatcagggacccagcgctcgtacaccagagacccgcgcctccctctacggtaaccacggcaggcgtaaccccccagcccgagagcctgtccccgagcggcaaggagcctgcagcgagcagcccctcaagcaacaacacagccgctaccaccgcggcaatcgtgcccggcagccagctgatgccctcaaagagccccagcaccggcaccactgagataagcagccacgagagctcacacggcactccctcacagaccactgccaagaattgggagctgaccgcctctgccagccaccagcccccaggcgtgtatccccagggccacagcgacaccacggtcgccatcagcacatctacagtgcttttgtgcggccttagcgccgtgtcactgctggcatgctacttgaaaagtaggcaaactccccctcttgccagtgtggaaatggaggccatggaagccctgcccgtgacctggggcaccagttctagggacgaggaccttgagaactgctcacatcatttgggatcctcactggcgctcagccttactgccgaccaaatggtatcagctcttctggacgcagaacccccaattctttattccgagtacgaccccacacgcccgttcagtgaagcttccatgatgggcctccttacgaaccttgccgaccgggaactcgtgcacatgatcaattgggcgaagcgggtgccggggttcgtagatttgacacttcacgaccaagttcatctcttggaatgtgcttggatggagatattgatgatcggactcgtgtggaggtcaatggagcatcctggtaaacttcttttcgcacccaatctgctcttggatagaaatcagggtaagtgcgtcgagggtggcgttgaaatcttcgacatgctccttgcgatatccagccgattccgaatgatgaatcttcaaggagaggaatttgtctgtcttaagagcattatactcctcaatagtggagtttacaccttcttgtcctctacactgaaatcacttgaggaaaaagatcacatacatagggtgttggataaaatcacggatacactcatacatctgatggcaaaagcaggattgaccctgcaacagcagcaccaacgactggcccaactgctgttgatccttagccatatcagacacatgtctaacaaaaggatggaacatttgtacagcatgaaatgtaagaacgtagtgccactgtccgatttgttgctggaaatgctggacgctcatcggctctaa

SEQ ID NO: 256 - protein, 642 aa, Artificial Sequence
  Description of Artificial Sequence: Synthetic Construct
MDWTWILFLVAAATRVHSNWVNVISDLKKIEDLIQSMHIDATLYTESDVHPSCKVTAMKCFLLELQVISLESGDASIHDTVENLIILANNSLSSNGNVTESGCKECEELEEKNIKEFLQSFVHIVQMFINTSSGGGSGGGGSGGGGSGGGGSGGGSLQITCPPPMSVEHADIWVKSYSLYSRERYICNSGFKRKAGTSSLTECVLNKATNVAHWTTPSLKCIRDPALVHQRPAPPSTVTTAGVTPQPESLSPSGKEPAASSPSSNNTAATTAAIVPGSQLMPSKSPSTGTTEISSHESSHGTPSQTTAKNWELTASASHQPPGVYPQGHSDTTVAISTSTVLLCGLSAVSLLACYLKSRQTPPLASVEMEAMEALPVTWGTSSRDEDLENCSHHLGSSLALSLTADQMVSALLDAEPPILYSEYDPTRPFSEASMMGLLTNLADRELVHMINWAKRVPGFVDLTLHDQVHLLECAWMEILMIGLVWRSMEHPGKLLFAPNLLLDRDQGKCVEGGVEIFDMLLATSSRFRMMNLQGEEFVCLKSIILLNSGVYTFLSSTLKSLEEKDHIHRVLDKITDTLIHLMAKAGLTLQQQHQRLAQLLLILSHIRHMSNKRMEHLYSMKCKNVVPLSDLLLEMLDAHRL

SEQ ID NO: 257 - DNA, 1929 bp, Artificial Sequence
  Description of Artificial Sequence: Synthetic Construct
atggactggacatggatactcttcctggtagcagccgccacacgagtgcacagcaactgggtgaacgtgatctccgacctgaaaaagatcgaggatttgatccagagcatgcacattgacgccaccctgtataccgagtccgacgtgcacccgagttgcaaggtgactgccatgaagtgcttcctgctggagctgcaagtgatcagcctggagagcggcgacgccagcatccacgacaccgtggaaaaccttatcattctggccaacaatagcctgagcagcaacggcaacgtgaccgaaagcggatgtaaggaatgcgaggaactggaagagaagaatatcaaagaattcctgcaaagcttcgtgcacatcgtgcagatgttcatcaacacttcttcaggtggcggtagtggtgggggaggatctggaggcggaggaagcgggggtggaggttcaggaggagggagcttgcaaattacctgcccccctccgatgagcgtggagcacgccgacatctgggtcaagagctacagcttgtatagtagggagcggtacatctgtaacagcgggttcaagaggaaggccgggaccagctcactgaccgagtgcgtgttgaacaaggccaccaacgtggcccactggaccacccctagccttaagtgcatcagggacccagcgctcgtacaccagagacccgcgcctccctctacggtaaccacggcaggcgtaaccccccagcccgagagcctgtccccgagcggcaaggagcctgcagcgagcagcccctcaagcaacaacacagccgctaccaccgcggcaatcgtgcccggcagccagctgatgccctcaaagagccccagcaccggcaccactgagataagcagccacgagagctcacacggcactccctcacagaccactgccaagaattgggagctgaccgcctctgccagccaccagcccccaggcgtgtatccccagggccacagcgacaccacggtcgccatcagcacatctacagtgcttttgtgcggccttagcgccgtgtcactgctggcatgctacttgaaaagtaggcaaactccccctcttgccagtgtggaaatggaggccatggaagccctgcccgtgacctggggcaccagttctagggacgaggaccttgagaactgctcacatcatttgggatcctcactggcgctcagccttactgccgaccaaatggtatcagctcttctggacgcagaacccccaattctttattccgagtacgaccccacacgcccgttcagtgaagcttccatgatgggcctccttacgaaccttgccgaccgggaactcgtgcacatgatcaattgggcgaagcgggtgccggggttcgtagatttgacacttcacgaccaagttcatctcttggaatgtgcttggatggagatattgatgatcggactcgtgtggaggtcaatggagcatcctggtaaacttcttttcgcacccaatctgctcttggatagagatcagggtaagtgcgtcgagggtggcgttgaaatcttcgacatgctccttgcgacatccagccgattccgaatgatgaatcttcaaggagaggaatttgtctgtcttaagagcattatactcctcaatagtggagtttacaccttcttgtcctctacactgaaatcacttgaggaaaaagatcacatacatagggtgttggataaaatcacggatacactcatacatctgatggcaaaagcaggattgaccctgcaacagcagcaccaacgactggcccaactgctgttgatccttagccatatcagacacatgtctaacaaaaggatggaacatttgtacagcatgaaatgtaagaacgtagtgccactgtccgatttgttgctggaaatgctggacgctcatcggctctaa

SEQ ID NO: 258 - protein, 642 aa, Artificial Sequence
  Description of Artificial Sequence: Synthetic Construct
MDWTWILFLVAAATRVHSNWVNVISDLKKIEDLIQSMHIDATLYTESDVHPSCKVTAMKCFLLELQVISLESGDASIHDTVENLIILANNSLSSNGNVTESGCKECEELEEKNIKEFLQSFVHIVQMFINTSSGGGSGGGGSGGGGSGGGGSGGGSLQITCPPPMSVEHADIWVKSYSLYSRERYICNSGFKRKAGTSSLTECVLNKATNVAHWTTPSLKCIRDPALVHQRPAPPSTVTTAGVTPQPESLSPSGKEPAASSPSSNNTAATTAAIVPGSQLMPSKSPSTGTTEISSHESSHGTPSQTTAKNWELTASASHQPPGVYPQGHSDTTVAISTSTVLLCGLSAVSLLACYLKSRQTPPLASVEMEAMEALPVTWGTSSRDEDLENCSHHLGSSLALSLTADQMVSALLDAEPPILYSEYDPTRPFSEASMMGLLTNLADRELVHMINWAKRVPGFVDLTLHDQVHLLECAWMEILMIGLVWRSMEHPGKLLFAPNLLLDRNQGKCVEGGVEIFDMLLATSSRFRMMNLQGEEFVCLKSIILLNSGVYTFLSSTLKSLEEKDHIHRVLDKITDTLIHLMAKAGLTLQQQHQRLAQLLLILSHIRHMSSKRMEHLYSMKCKNVVPLSDLLLEMLDAHRL

SEQ ID NO: 259 - DNA, 1929 bp, Artificial Sequence
  Description of Artificial Sequence: Synthetic Construct
atggactggacatggatactcttcctggtagcagccgccacacgagtgcacagcaactgggtgaacgtgatctccgacctgaaaaagatcgaggatttgatccagagcatgcacattgacgccaccctgtataccgagtccgacgtgcacccgagttgcaaggtgactgccatgaagtgcttcctgctggagctgcaagtgatcagcctggagagcggcgacgccagcatccacgacaccgtggaaaaccttatcattctggccaacaatagcctgagcagcaacggcaacgtgaccgaaagcggatgtaaggaatgcgaggaactggaagagaagaatatcaaagaattcctgcaaagcttcgtgcacatcgtgcagatgttcatcaacacttcttcaggtggcggtagtggtgggggaggatctggaggcggaggaagcgggggtggaggttcaggaggagggagcttgcaaattacctgcccccctccgatgagcgtggagcacgccgacatctgggtcaagagctacagcttgtatagtagggagcggtacatctgtaacagcgggttcaagaggaaggccgggaccagctcactgaccgagtgcgtgttgaacaaggccaccaacgtggcccactggaccacccctagccttaagtgcatcagggacccagcgctcgtacaccagagacccgcgcctccctctacggtaaccacggcaggcgtaaccccccagcccgagagcctgtccccgagcggcaaggagcctgcagcgagcagcccctcaagcaacaacacagccgctaccaccgcggcaatcgtgcccggcagccagctgatgccctcaaagagccccagcaccggcaccactgagataagcagccacgagagctcacacggcactccctcacagaccactgccaagaattgggagctgaccgcctctgccagccaccagcccccaggcgtgtatccccagggccacagcgacaccacggtcgccatcagcacatctacagtgcttttgtgcggccttagcgccgtgtcactgctggcatgctacttgaaaagtaggcaaactccccctcttgccagtgtggaaatggaggccatggaagccctgcccgtgacctggggcaccagttctagggacgaggaccttgagaactgctcacatcatttgggatcctcactggcgctcagccttactgccgaccaaatggtatcagctcttctggacgcagaacccccaattctttattccgagtacgaccccacacgcccgttcagtgaagcttccatgatgggcctccttacgaaccttgccgaccgggaactcgtgcacatgatcaattgggcgaagcgggtgccggggttcgtagatttgacacttcacgaccaagttcatctcttggaatgtgcttggatggagatattgatgatcggactcgtgtggaggtcaatggagcatcctggtaaacttcttttcgcacccaatctgctcttggatagaaatcagggtaagtgcgtcgagggtggcgttgaaatcttcgacatgctccttgcgacatccagccgattccgaatgatgaatcttcaaggagaggaatttgtctgtcttaagagcattatactcctcaatagtggagtttacaccttcttgtcctctacactgaaatcacttgaggaaaaagatcacatacatagggtgttggataaaatcacggatacactcatacatctgatggcaaaagcaggattgaccctgcaacagcagcaccaacgactggcccaactgctgttgatccttagccatatcagacacatgtctagcaaaaggatggaacatttgtacagcatgaaatgtaagaacgtagtgccactgtccgatttgttgctggaaatgctggacgctcatcggctctaa

SEQ ID NO: 260 - protein, 642 aa, Artificial Sequence
  Description of Artificial Sequence: Synthetic Construct
MDWTWILFLVAAATRVHSNWVNVISDLKKIEDLIQSMHIDATLYTESDVHPSCKVTAMKCFLLELQVISLESGDASIHDTVENLIILANNSLSSNGNVTESGCKECEELEEKNIKEFLQSFVHIVQMFINTSSGGGSGGGGSGGGGSGGGGSGGGSLQITCPPPMSVEHADIWVKSYSLYSRERYICNSGFKRKAGTSSLTECVLNKATNVAHWTTPSLKCIRDPALVHQRPAPPSTVTTAGVTPQPESLSPSGKEPAASSPSSNNTAATTAAIVPGSQLMPSKSPSTGTTEISSHESSHGTPSQTTAKNWELTASASHQPPGVYPQGHSDTTVAISTSTVLLCGLSAVSLLACYLKSRQTPPLASVEMEAMEALPVTWGTSSRDEDLENCSHHLGSSLALSLTADQMVSALLDAEPPILYSEYDPTRPFSEASMMGLLTNLADRELVHMINWAKRVPGFVDLTLHDQVHLLECAWMEILMIGLVWRSMEHPGKLLFAPNLLLDRNQGKCVEGGVEIFDMLLATSSRFRMMNLQGEEFVCLKSIILLNSGVYTFLSSTLKSLEEKDHIHRVLDKITDTLIHLMAKAGLTLQQQHRRLAQLLLILSHIRHMSNKRMEHLYSMKCKNVVPLSDLLLEMLDAHRL

SEQ ID NO: 261 - DNA, 1929 bp, Artificial Sequence
  Description of Artificial Sequence: Synthetic Construct
atggactggacatggatactcttcctggtagcagccgccacacgagtgcacagcaactgggtgaacgtgatctccgacctgaaaaagatcgaggatttgatccagagcatgcacattgacgccaccctgtataccgagtccgacgtgcacccgagttgcaaggtgactgccatgaagtgcttcctgctggagctgcaagtgatcagcctggagagcggcgacgccagcatccacgacaccgtggaaaaccttatcattctggccaacaatagcctgagcagcaacggcaacgtgaccgaaagcggatgtaaggaatgcgaggaactggaagagaagaatatcaaagaattcctgcaaagcttcgtgcacatcgtgcagatgttcatcaacacttcttcaggtggcggtagtggtgggggaggatctggaggcggaggaagcgggggtggaggttcaggaggagggagcttgcaaattacctgcccccctccgatgagcgtggagcacgccgacatctgggtcaagagctacagcttgtatagtagggagcggtacatctgtaacagcgggttcaagaggaaggccgggaccagctcactgaccgagtgcgtgttgaacaaggccaccaacgtggcccactggaccacccctagccttaagtgcatcagggacccagcgctcgtacaccagagacccgcgcctccctctacggtaaccacggcaggcgtaaccccccagcccgagagcctgtccccgagcggcaaggagcctgcagcgagcagcccctcaagcaacaacacagccgctaccaccgcggcaatcgtgcccggcagccagctgatgccctcaaagagccccagcaccggcaccactgagataagcagccacgagagctcacacggcactccctcacagaccactgccaagaattgggagctgaccgcctctgccagccaccagcccccaggcgtgtatccccagggccacagcgacaccacggtcgccatcagcacatctacagtgcttttgtgcggccttagcgccgtgtcactgctggcatgctacttgaaaagtaggcaaactccccctcttgccagtgtggaaatggaggccatggaagccctgcccgtgacctggggcaccagttctagggacgaggaccttgagaactgctcacatcatttgggatcctcactggcgctcagccttactgccgaccaaatggtatcagctcttctggacgcagaacccccaattctttattccgagtacgaccccacacgcccgttcagtgaagcttccatgatgggcctccttacgaaccttgccgaccgggaactcgtgcacatgatcaattgggcgaagcgggtgccggggttcgtagatttgacacttcacgaccaagttcatctcttggaatgtgcttggatggagatattgatgatcggactcgtgtggaggtcaatggagcatcctggtaaacttcttttcgcacccaatctgctcttggatagaaatcagggtaagtgcgtcgagggtggcgttgaaatcttcgacatgctccttgcgacatccagccgattccgaatgatgaatcttcaaggagaggaatttgtctgtcttaagagcattatactcctcaatagtggagtttacaccttcttgtcctctacactgaaatcacttgaggaaaaagatcacatacatagggtgttggataaaatcacggatacactcatacatctgatggcaaaagcaggattgaccctgcaacagcagcaccgacgactggcccaactgctgttgatccttagccatatcagacacatgtctaacaaaaggatggaacatttgtacagcatgaaatgtaagaacgtagtgccactgtccgatttgttgctggaaatgctggacgctcatcggctctaa

SEQ ID NO: 262 - protein, 642 aa, Artificial Sequence
  Description of Artificial Sequence: Synthetic Construct
MDWTWILFLVAAATRVHSNWVNVISDLKKIEDLIQSMHIDATLYTESDVHPSCKVTAMKCFLLELQVISLESGDASIHDTVENLIILANNSLSSNGNVTESGCKECEELEEKNIKEFLQSFVHIVQMFINTSSGGGSGGGGSGGGGSGGGGSGGGSLQITCPPPMSVEHADIWVKSYSLYSRERYICNSGFKRKAGTSSLTECVLNKATNVAHWTTPSLKCIRDPALVHQRPAPPSTVTTAGVTPQPESLSPSGKEPAASSPSSNNTAATTAAIVPGSQLMPSKSPSTGTTEISSHESSHGTPSQTTAKNWELTASASHQPPGVYPQGHSDTTVAISTSTVLLCGLSAVSLLACYLKSRQTPPLASVEMEAMEALPVTWGTSSRDEDLENCSHHLGSSLALSLTADQMVSALLDAEPPILYSEYDPTRPFSEASMMGLLTNLADRELVHMINWAKRVPGFVDLALHDQVHLLECAWMEILMIGLVWRSMEHPGKLLFAPNLLLDRNQGKCVEGGVEIFDMLLATSSRFRMMNLQGEEFVCLKSIILLNSGVYTFLSSTLKSLEEKDHIHRVLDKITDTLIHLMAKAGLTLQQQHQRLAQLLLILSHIRHMSSKRMEHLYSMKCKNVVPLSDLLLEMLDAHRL

SEQ ID NO: 263 - DNA, 1929 bp, Artificial Sequence
  Description of Artificial Sequence: Synthetic Construct
atggactggacatggatactcttcctggtagcagccgccacacgagtgcacagcaactgggtgaacgtgatctccgacctgaaaaagatcgaggatttgatccagagcatgcacattgacgccaccctgtataccgagtccgacgtgcacccgagttgcaaggtgactgccatgaagtgcttcctgctggagctgcaagtgatcagcctggagagcggcgacgccagcatccacgacaccgtggaaaaccttatcattctggccaacaatagcctgagcagcaacggcaacgtgaccgaaagcggatgtaaggaatgcgaggaactggaagagaagaatatcaaagaattcctgcaaagcttcgtgcacatcgtgcagatgttcatcaacacttcttcaggtggcggtagtggtgggggaggatctggaggcggaggaagcgggggtggaggttcaggaggagggagcttgcaaattacctgcccccctccgatgagcgtggagcacgccgacatctgggtcaagagctacagcttgtatagtagggagcggtacatctgtaacagcgggttcaagaggaaggccgggaccagctcactgaccgagtgcgtgttgaacaaggccaccaacgtggcccactggaccacccctagccttaagtgcatcagggacccagcgctcgtacaccagagacccgcgcctccctctacggtaaccacggcaggcgtaaccccccagcccgagagcctgtccccgagcggcaaggagcctgcagcgagcagcccctcaagcaacaacacagccgctaccaccgcggcaatcgtgcccggcagccagctgatgccctcaaagagccccagcaccggcaccactgagataagcagccacgagagctcacacggcactccctcacagaccactgccaagaattgggagctgaccgcctctgccagccaccagcccccaggcgtgtatccccagggccacagcgacaccacggtcgccatcagcacatctacagtgcttttgtgcggccttagcgccgtgtcactgctggcatgctacttgaaaagtaggcaaactccccctcttgccagtgtggaaatggaggccatggaagccctgcccgtgacctggggcaccagttctagggacgaggaccttgagaactgctcacatcatttgggatcctcactggcgctcagccttactgccgaccaaatggtatcagctcttctggacgcagaacccccaattctttattccgagtacgaccccacacgcccgttcagtgaagcttccatgatgggcctccttacgaaccttgccgaccgggaactcgtgcacatgatcaattgggcgaagcgggtgccggggttcgtagatttggcacttcacgaccaagttcatctcttggaatgtgcttggatggagatattgatgatcggactcgtgtggaggtcaatggagcatcctggtaaacttcttttcgcacccaatctgctcttggatagaaatcagggtaagtgcgtcgagggtggcgttgaaatcttcgacatgctccttgcgacatccagccgattccgaatgatgaatcttcaaggagaggaatttgtctgtcttaagagcattatactcctcaatagtggagtttacaccttcttgtcctctacactgaaatcacttgaggaaaaagatcacatacatagggtgttggataaaatcacggatacactcatacatctgatggcaaaagcaggattgaccctgcaacagcagcaccaacgactggcccaactgctgttgatccttagccatatcagacacatgtctagcaaaaggatggaacatttgtacagcatgaaatgtaagaacgtagtgccactgtccgatttgttgctggaaatgctggacgctcatcggctctaa

SEQ ID NO: 264 - protein, 642 aa, Artificial Sequence
  Description of Artificial Sequence: Synthetic Construct
MDWTWILFLVAAATRVHSNWVNVISDLKKIEDLIQSMHIDATLYTESDVHPSCKVTAMKCFLLELQVISLESGDASIHDTVENLIILANNSLSSNGNVTESGCKECEELEEKNIKEFLQSFVHIVQMFINTSSGGGSGGGGSGGGGSGGGGSGGGSLQITCPPPMSVEHADIWVKSYSLYSRERYICNSGFKRKAGTSSLTECVLNKATNVAHWTTPSLKCIRDPALVHQRPAPPSTVTTAGVTPQPESLSPSGKEPAASSPSSNNTAATTAAIVPGSQLMPSKSPSTGTTEISSHESSHGTPSQTTAKNWELTASASHQPPGVYPQGHSDTTVAISTSTVLLCGLSAVSLLACYLKSRQTPPLASVEMEAMEALPVTWGTSSRDEDLENCSHHLGSNLALSLTADQMVSALLDAEPPILYSEYDPTRPFSEASMMGLLTNLADRELVHMINWAKRVPGFVDLTLHDQVHLLECAWMEILMIGLVWRSMEHPGKLLFAPNLLLDRNQGKCVEGGVEIFDMLLATSSRFRMMNLQVEEFVCLKSIILLNSGVYTFLSSTLKSLEEKDHIHRVLDKITDTLIHLMAKAGLTLQQQHQRLAQLLLILSHIRHMSNKRMEHLYSMKCKNVVPLSDLLLEMLDAHRL

SEQ ID NO: 265 - DNA, 1929 bp, Artificial Sequence
  Description of Artificial Sequence: Synthetic Construct
atggactggacatggatactcttcctggtagcagccgccacacgagtgcacagcaactgggtgaacgtgatctccgacctgaaaaagatcgaggatttgatccagagcatgcacattgacgccaccctgtataccgagtccgacgtgcacccgagttgcaaggtgactgccatgaagtgcttcctgctggagctgcaagtgatcagcctggagagcggcgacgccagcatccacgacaccgtggaaaaccttatcattctggccaacaatagcctgagcagcaacggcaacgtgaccgaaagcggatgtaaggaatgcgaggaactggaagagaagaatatcaaagaattcctgcaaagcttcgtgcacatcgtgcagatgttcatcaacacttcttcaggtggcggtagtggtgggggaggatctggaggcggaggaagcgggggtggaggttcaggaggagggagcttgcaaattacctgcccccctccgatgagcgtggagcacgccgacatctgggtcaagagctacagcttgtatagtagggagcggtacatctgtaacagcgggttcaagaggaaggccgggaccagctcactgaccgagtgcgtgttgaacaaggccaccaacgtggcccactggaccacccctagccttaagtgcatcagggacccagcgctcgtacaccagagacccgcgcctccctctacggtaaccacggcaggcgtaaccccccagcccgagagcctgtccccgagcggcaaggagcctgcagcgagcagcccctcaagcaacaacacagccgctaccaccgcggcaatcgtgcccggcagccagctgatgccctcaaagagccccagcaccggcaccactgagataagcagccacgagagctcacacggcactccctcacagaccactgccaagaattgggagctgaccgcctctgccagccaccagcccccaggcgtgtatccccagggccacagcgacaccacggtcgccatcagcacatctacagtgcttttgtgcggccttagcgccgtgtcactgctggcatgctacttgaaaagtaggcaaactccccctcttgccagtgtggaaatggaggccatggaagccctgcccgtgacctggggcaccagttctagggacgaggaccttgagaactgctcacatcatttgggatccaatctggcgctcagccttactgccgaccaaatggtatcagctcttctggacgcagaacccccaattctttattccgagtacgaccccacacgcccgttcagtgaagcttccatgatgggcctccttacgaaccttgccgaccgggaactcgtgcacatgatcaattgggcgaagcgggtgccggggttcgtagatttgacacttcacgaccaagttcatctcttggaatgtgcttggatggagatattgatgatcggactcgtgtggaggtcaatggagcatcctggtaaacttcttttcgcacccaatctgctcttggatagaaatcagggtaagtgcgtcgagggtggcgttgaaatcttcgacatgctccttgcgacatccagccgattccgaatgatgaatcttcaagtagaggaatttgtctgtcttaagagcattatactcctcaatagtggagtttacaccttcttgtcctctacactgaaatcacttgaggaaaaagatcacatacatagggtgttggataaaatcacggatacactcatacatctgatggcaaaagcaggattgaccctgcaacagcagcaccaacgactggcccaactgctgttgatccttagccatatcagacacatgtctaacaaaaggatggaacatttgtacagcatgaaatgtaagaacgtagtgccactgtccgatttgttgctggaaatgctggacgctcatcggctctaa

SEQ ID NO: 266 - protein, 642 aa, Artificial Sequence
  Description of Artificial Sequence: Synthetic Construct
MDWTWILFLVAAATRVHSNWVNVISDLKKIEDLIQSMHIDATLYTESDVHPSCKVTAMKCFLLELQVISLESGDASIHDTVENLIILANNSLSSNGNVTESGCKECEELEEKNIKEFLQSFVHIVQMFINTSSGGGSGGGGSGGGGSGGGGSGGGSLQITCPPPMSVEHADIWVKSYSLYSRERYICNSGFKRKAGTSSLTECVLNKATNVAHWTTPSLKCIRDPALVHQRPAPPSTVTTAGVTPQPESLSPSGKEPAASSPSSNNTAATTAAIVPGSQLMPSKSPSTGTTEISSHESSHGTPSQTTAKNWELTASASHQPPGVYPQGHSDTTVAISTSTVLLCGLSAVSLLACYLKSRQTPPLASVEMEAMEALPVTWGTSSRDEDLENCSHHLGSSLALSLTADQMVSALLDAEPPILYSEYDPTGPFSEASMMGLLTNLADRELVHMINWAKRVPGFVDLTLHDQVHLLECAWMEILMIGLVWRSMEHPGKLLFAPNLLLDRNQGKCVEGGVEIFDMLLATSSRFRMMNLQGEEFVCLKSIILLNSGVYTFLSSTLKSLEEKDHIHRVLDKITDTLIHLMAKAGLTLQQQHQRLAQLLLILSHIRHMSSKRMEHLYSMKCKNVVPLSDLLLEMLDAHRL

SEQ ID NO: 267 - DNA, 1929 bp, Artificial Sequence
  Description of Artificial Sequence: Synthetic Construct
atggactggacatggatactcttcctggtagcagccgccacacgagtgcacagcaactgggtgaacgtgatctccgacctgaaaaagatcgaggatttgatccagagcatgcacattgacgccaccctgtataccgagtccgacgtgcacccgagttgcaaggtgactgccatgaagtgcttcctgctggagctgcaagtgatcagcctggagagcggcgacgccagcatccacgacaccgtggaaaaccttatcattctggccaacaatagcctgagcagcaacggcaacgtgaccgaaagcggatgtaaggaatgcgaggaactggaagagaagaatatcaaagaattcctgcaaagcttcgtgcacatcgtgcagatgttcatcaacacttcttcaggtggcggtagtggtgggggaggatctggaggcggaggaagcgggggtggaggttcaggaggagggagcttgcaaattacctgcccccctccgatgagcgtggagcacgccgacatctgggtcaagagctacagcttgtatagtagggagcggtacatctgtaacagcgggttcaagaggaaggccgggaccagctcactgaccgagtgcgtgttgaacaaggccaccaacgtggcccactggaccacccctagccttaagtgcatcagggacccagcgctcgtacaccagagacccgcgcctccctctacggtaaccacggcaggcgtaaccccccagcccgagagcctgtccccgagcggcaaggagcctgcagcgagcagcccctcaagcaacaacacagccgctaccaccgcggcaatcgtgcccggcagccagctgatgccctcaaagagccccagcaccggcaccactgagataagcagccacgagagctcacacggcactccctcacagaccactgccaagaattgggagctgaccgcctctgccagccaccagcccccaggcgtgtatccccagggccacagcgacaccacggtcgccatcagcacatctacagtgcttttgtgcggccttagcgccgtgtcactgctggcatgctacttgaaaagtaggcaaactccccctcttgccagtgtggaaatggaggccatggaagccctgcccgtgacctggggcaccagttctagggacgaggaccttgagaactgctcacatcatttgggatcctcactggcgctcagccttactgccgaccaaatggtatcagctcttctggacgcagaacccccaattctttattccgagtacgaccccacaggcccgttcagtgaagcttccatgatgggcctccttacgaaccttgccgaccgggaactcgtgcacatgatcaattgggcgaagcgggtgccggggttcgtagatttgacacttcacgaccaagttcatctcttggaatgtgcttggatggagatattgatgatcggactcgtgtggaggtcaatggagcatcctggtaaacttcttttcgcacccaatctgctcttggatagaaatcagggtaagtgcgtcgagggtggcgttgaaatcttcgacatgctccttgcgacatccagccgattccgaatgatgaatcttcaaggagaggaatttgtctgtcttaagagcattatactcctcaatagtggagtttacaccttcttgtcctctacactgaaatcacttgaggaaaaagatcacatacatagggtgttggataaaatcacggatacactcatacatctgatggcaaaagcaggattgaccctgcaacagcagcaccaacgactggcccaactgctgttgatccttagccatatcagacacatgtctagcaaaaggatggaacatttgtacagcatgaaatgtaagaacgtagtgccactgtccgatttgttgctggaaatgctggacgctcatcggctctaa

SEQ ID NO: 268 - protein, 647 aa, Artificial Sequence
  Description of Artificial Sequence: Synthetic Construct
MALPVTALLLPLALLLHAARPGSSLALSLTADQMVSALLDAEPPILYSEYDPTRPFSEASMMGLLTNLADRELVHMINWAKRVPGFVDLALHDQVHLLECAWMEILMIGLVWRSMEHPGKLLFAPNLLLDRNQGKCVEGGVEIFDMLLATSSRFRMMNLQGEEFVCLKSIILLNSGVYTFLSSTLKSLEEKDHIHRVLDKITDTLIHLMAKAGLTLQQQHQRLAQLLLILSHIRHMSSKRMEHLYSMKCKNVVPLSDLLLEMLDAHRLGSNWVNVISDLKKIEDLIQSMHIDATLYTESDVHPSCKVTAMKCFLLELQVISLESGDASIHDTVENLIILANNSLSSNGNVTESGCKECEELEEKNIKEFLQSFVHIVQMFINTSSGGGSGGGGSGGGGSGGGGSGGGSLQITCPPPMSVEHADIWVKSYSLYSRERYICNSGFKRKAGTSSLTECVLNKATNVAHWTTPSLKCIRDPALVHQRPAPPSTVTTAGVTPQPESLSPSGKEPAASSPSSNNTAATTAAIVPGSQLMPSKSPSTGTTEISSHESSHGTPSQTTAKNWELTASASHQPPGVYPQGHSDTTVAISTSTVLLCGLSAVSLLACYLKSRQTPPLASVEMEAMEALPVTWGTSSRDEDLENCSHHL

SEQ ID NO: 269 - DNA, 1944 bp, Artificial Sequence
  Description of Artificial Sequence: Synthetic Construct
atggccttaccagtgaccgccttgctcctgccgctggccttgctgctccacgccgccaggccgggatcttcactggcgctcagccttactgccgaccaaatggtatcagctcttctggacgcagaacccccaattctttattccgagtacgaccccacacgcccgttcagtgaagcttccatgatgggcctccttacgaaccttgccgaccgggaactcgtgcacatgatcaattgggcgaagcgggtgccggggttcgtagatttggcacttcacgaccaagttcatctcttggaatgtgcttggatggagatattgatgatcggactcgtgtggaggtcaatggagcatcctggtaaacttcttttcgcacccaatctgctcttggatagaaatcagggtaagtgcgtcgagggtggcgttgaaatcttcgacatgctccttgcgacatccagccgattccgaatgatgaatcttcaaggagaggaatttgtctgtcttaagagcattatactcctcaatagtggagtttacaccttcttgtcctctacactgaaatcacttgaggaaaaagatcacatacatagggtgttggataaaatcacggatacactcatacatctgatggcaaaagcaggattgaccctgcaacagcagcaccaacgactggcccaactgctgttgatccttagccatatcagacacatgtctagcaaaaggatggaacatttgtacagcatgaaatgtaagaacgtagtgccactgtccgatttgttgctggaaatgctggacgctcatcggctcggatccaactgggtgaacgtgatctccgacctgaaaaagatcgaggatttgatccagagcatgcacattgacgccaccctgtataccgagtccgacgtgcacccgagttgcaaggtgactgccatgaagtgcttcctgctggagctgcaagtgatcagcctggagagcggcgacgccagcatccacgacaccgtggaaaaccttatcattctggccaacaatagcctgagcagcaacggcaacgtgaccgaaagcggatgtaaggaatgcgaggaactggaagagaagaatatcaaagaattcctgcaaagcttcgtgcacatcgtgcagatgttcatcaacacttcttcaggtggcggtagtggtgggggaggatctggaggcggaggaagcgggggtggaggttcaggaggagggagcttgcaaattacctgcccccctccgatgagcgtggagcacgccgacatctgggtcaagagctacagcttgtatagtagggagcggtacatctgtaacagcgggttcaagaggaaggccgggaccagctcactgaccgagtgcgtgttgaacaaggccaccaacgtggcccactggaccacccctagccttaagtgcatcagggacccagcgctcgtacaccagagacccgcgcctccctctacggtaaccacggcaggcgtaaccccccagcccgagagcctgtccccgagcggcaaggagcctgcagcgagcagcccctcaagcaacaacacagccgctaccaccgcggcaatcgtgcccggcagccagctgatgccctcaaagagccccagcaccggcaccactgagataagcagccacgagagctcacacggcactccctcacagaccactgccaagaattgggagctgaccgcctctgccagccaccagcccccaggcgtgtatccccagggccacagcgacaccacggtcgccatcagcacatctacagtgcttttgtgcggccttagcgccgtgtcactgctggcatgctacttgaaaagtaggcaaactccccctcttgccagtgtggaaatggaggccatggaagccctgcccgtgacctggggcaccagttctagggacgaggaccttgagaactgctcacatcatttgtaa

SEQ ID NO: 270 - protein, 20 aa, Homo sapiens
MYRMQLLSCIALSLALVTNS

SEQ ID NO: 271 - DNA, 60 bp, Homo sapiens
atgtacaggatgcaactcctgtcttgcattgcactaagtcttgcacttgtcacaaacagt

SEQ ID NO: 272 - DNA, 60 bp, Artificial Sequence
  Description of Artificial Sequence: Synthetic Signal Sequence
atgtaccgaatgcaactgctgagctgcatcgccctgagcctggcactcgtgaccaacagc

SEQ ID NO: 273 - DNA, 60 bp, Artificial Sequence
  Description of Artificial Sequence: Synthetic Signal Sequence
atgtacaggatgcagctgctgagctgcatcgccctgagcctggccctggtgaccaacagc

SEQ ID NO: 274 - DNA, 60 bp, Artificial Sequence
  Description of Artificial Sequence: Synthetic Signal Sequence
atgtacagaatgcagctgctgagctgcatcgccctgtccctcgccctggtgaccaactcc

SEQ ID NO: 275 - DNA, 66 bp, Homo sapiens
atgtgtcaccagcagttggtcatctcttggttttccctggtttttctggcatctcccctcgtggcc

SEQ ID NO: 276 - DNA, 66 bp, Artificial Sequence
  Description of Artificial Sequence: Synthetic Signal Sequence
atgtgccaccagcagctggtcatcagctggttctccctggtgtttctggcatcccctctggtggca

SEQ ID NO: 277 - DNA, 66 bp, Artificial Sequence
  Description of Artificial Sequence: Synthetic Signal Sequence
atgtgccaccagcagctggtcatcagctggttctccctggtgtttctggccagccctctggtggcc

SEQ ID NO: 278 - DNA, 66 bp, Artificial Sequence
  Description of Artificial Sequence: Synthetic Signal Sequence
atgtgccaccagcagctggtcatcagctggttctccctggtgtttctggcaagccctctggtggca

SEQ ID NO: 279 - DNA, 66 bp, Artificial Sequence
  Description of Artificial Sequence: Synthetic Signal Sequence
atgtgccaccagcagctggtcatcagctggttctccctggtgtttctggcatccccactggtggca

SEQ ID NO: 280 - DNA, 66 bp, Artificial Sequence
  Description of Artificial Sequence: Synthetic Signal Sequence
atgtgccaccagcagctggtcatctcttggttcagcctggtgtttctggcctcccccctggtggcc

SEQ ID NO: 281 - DNA, 66 bp, Artificial Sequence
  Description of Artificial Sequence: Synthetic Signal Sequence
atgtgccaccagcagctggtcatctcctggttctctctggtgtttctggcatctcctctggtggca

SEQ ID NO: 282 - DNA, 66 bp, Artificial Sequence
  Description of Artificial Sequence: Synthetic Signal Sequence
atgtgccaccagcagctggtcatctcttggttcagcctggtgtttctggcatccccactggtggca

SEQ ID NO: 283 - protein, 21 aa, Artificial Sequence
  Description of Artificial Sequence: Synthetic peptide
LLLVTSLLLCELPHPAFLLIP

SEQ ID NO: 284 - protein, 22 aa, Artificial Sequence
  Description of Artificial Sequence: Synthetic peptide
LLVTSLLLCELPHPAFLLIPDT

SEQ ID NO: 285 - protein, 24 aa, Artificial Sequence
  Description of Artificial Sequence: Synthetic peptide
MVLLVTSLLLCELPHPAFLLIPDT

SEQ ID NO: 286 - DNA, 63 bp, Artificial Sequence
  Description of Artificial Sequence: Synthetic Signal Sequence
atggcactgcctgtgaccgccctgctgctgccactggccctgctgctgcacgcagccaggccc

SEQ ID NO: 287 - DNA, 63 bp, Artificial Sequence
  Description of Artificial Sequence: Synthetic Signal Sequence
atggcactgccagtgacagccctgctgctgcctctggccctgctgctgcacgcagccagacct

SEQ ID NO: 288 - DNA, 63 bp, Artificial Sequence
  Description of Artificial Sequence: Synthetic Signal Sequence
atggcactgcctgtgacagccctgctgctgccactggccctgctgctgcacgcagcccgccct

SEQ ID NO: 289 - DNA, 63 bp, Artificial Sequence
  Description of Artificial Sequence: Synthetic Signal Sequence
atggcactgcctgtgaccgccctgctgctgccactggccctgctgctgcacgcagcccgccct

SEQ ID NO: 290 - DNA, 63 bp, Artificial Sequence
  Description of Artificial Sequence: Synthetic Signal Sequence
atggcactgcctgtgaccgccctgctgctgccactggccctgctgctgcacgcagccaggcct

SEQ ID NO: 291 - DNA, 63 bp, Artificial Sequence
  Description of Artificial Sequence: Synthetic Signal Sequence
atggcactgccagtgaccgccctgctgctgcctctggccctgctgctgcacgcagccagacca

SEQ ID NO: 292 - DNA, 63 bp, Artificial Sequence
  Description of Artificial Sequence: Synthetic Signal Sequence
atggcactgcctgtgaccgccctgctgctgccactggccctgctgctgcacgcagccaggcca

SEQ ID NO: 293 - protein, 30 aa, Homo sapiens
MAPRRARGCRTLGLPALLLLLLLRPPATRG

SEQ ID NO: 294 - DNA, 90 bp, Homo sapiens
atggccccgcggcgggcgcgcggctgccggaccctcggtctcccggcgctgctactgctgctgctgctccggccgccggcgacgcggggc

SEQ ID NO: 295 - protein, 9 aa, Homo sapiens
SARNRQKRS

SEQ ID NO: 296 - DNA, 27 bp, Homo sapiens
agcgccaggaatcgccagaagcggtcc

SEQ ID NO: 297 - protein, 8 aa, Homo sapiens
ARNRQKRS

SEQ ID NO: 298 - DNA, 24 bp, Homo sapiens
gcccggaatagacagaagagatct

SEQ ID NO: 299 - protein, 12 aa, Artificial Sequence
  Description of Artificial Sequence: Synthetic Cleavage site sequence
ESRRVRRNKRSK

SEQ ID NO: 300 - DNA, 36 bp, Artificial Sequence
  Description of Artificial Sequence: Synthetic Cleavage site sequence
gagtctaggcgcgtgcggagaaataagcggagcaag

SEQ ID NO: 301 - DNA, 36 bp, Artificial Sequence
  Description of Artificial Sequence: Synthetic Cleavage site sequence
gagtctcggagagtgaggcgcaataagaggagcaag

SEQ ID NO: 302 - DNA, 36 bp, Artificial Sequence; identical to SEQ ID NO: 119
  Description of Artificial Sequence: Synthetic Cleavage site sequence

SEQ ID NO: 303 - protein, 14 aa, Artificial Sequence
  Description of Artificial Sequence: Synthetic Cleavage site sequence
SGESRRVRRNKRSK

SEQ ID NO: 304 - DNA, 42 bp, Artificial Sequence
  Description of Artificial Sequence: Synthetic Cleavage site sequence
agtggtgagtccaggagagtgcggcgcaacaagaggagcaag

SEQ ID NO: 305 - protein, 4 aa, Artificial Sequence
  Description of Artificial Sequence: Synthetic peptide
NPGP

SEQ ID NO: 306 - protein, 4 aa, Artificial Sequence
  Description of Artificial Sequence: Synthetic Linker
GGSG

SEQ ID NO: 307 - DNA, 12 bp, Artificial Sequence
  Description of Artificial Sequence: Synthetic Linker
ggaggatctgga

SEQ ID NO: 308 - protein, 5 aa, Artificial Sequence
  Description of Artificial Sequence: Synthetic Linker
GGSGG

SEQ ID NO: 309 - DNA, 15 bp, Artificial Sequence
  Description of Artificial Sequence: Synthetic Linker
ggaggcagcggagga

SEQ ID NO: 310 - DNA, 15 bp, Artificial Sequence
  Description of Artificial Sequence: Synthetic Linker
ggaggctctggagga

SEQ ID NO: 311 - DNA, 15 bp, Artificial Sequence
  Description of Artificial Sequence: Synthetic Linker
ggaggctccggcgga

SEQ ID NO: 312 - DNA, 15 bp, Artificial Sequence
  Description of Artificial Sequence: Synthetic Linker
ggaggatccggaggc

SEQ ID NO: 313 - DNA, 15 bp, Artificial Sequence
  Description of Artificial Sequence: Synthetic Linker
ggaggatctggagga

SEQ ID NO: 314 - protein, 6 aa, Artificial Sequence
  Description of Artificial Sequence: Synthetic Linker
GGSGGG

SEQ ID NO: 315 - DNA, 18 bp, Artificial Sequence
  Description of Artificial Sequence: Synthetic Linker
ggtggctctggtggtggt

SEQ ID NO: 316 - DNA, 18 bp, Artificial Sequence
  Description of Artificial Sequence: Synthetic Linker
ggaggtagtggtggaggc

SEQ ID NO: 317 - protein, 5 aa, Artificial Sequence
  Description of Artificial Sequence: Synthetic Linker
SGGGS

SEQ ID NO: 318 - DNA, 15 bp, Artificial Sequence
  Description of Artificial Sequence: Synthetic Linker
tcaggtggcggtagt

SEQ ID NO: 319 - protein, 9 aa, Artificial Sequence
  Description of Artificial Sequence: Synthetic Linker
GGSGGGSGG

SEQ ID NO: 320 - DNA, 27 bp, Artificial Sequence
  Description of Artificial Sequence: Synthetic Linker
ggaggtagtggtggaggcagtggtgga

SEQ ID NO: 321 - protein, 5 aa, Artificial Sequence
  Description of Artificial Sequence: Synthetic Linker
GGGGG

SEQ ID NO: 322 - protein, 5 aa, Artificial Sequence
  Description of Artificial Sequence: Synthetic Linker
GGGGS

SEQ ID NO: 323 - protein, 10 aa, Artificial Sequence
  Description of Artificial Sequence: Synthetic Linker
GGGGSGGGGS

SEQ ID NO: 324 - protein, 20 aa, Artificial Sequence
  Description of Artificial Sequence: Synthetic Linker
GGGGSGGGGSGGGGSGGGGS

SEQ ID NO: 325 - protein, 25 aa, Artificial Sequence
  Description of Artificial Sequence: Synthetic Linker
GGGGSGGGGSGGGGSGGGGSGGGGS

SEQ ID NO: 326 - protein, 30 aa, Artificial Sequence
  Description of Artificial Sequence: Synthetic Linker
GGGGSGGGGSGGGGSGGGGSGGGGSGGGGS

SEQ ID NO: 327 - protein, 5 aa, Artificial Sequence
  Description of Artificial Sequence: Synthetic Linker
SSSSG

SEQ ID NO: 328 - protein, 10 aa, Artificial Sequence
  Description of Artificial Sequence: Synthetic Linker
SSSSGSSSSG

SEQ ID NO: 329 - protein, 15 aa, Artificial Sequence
  Description of Artificial Sequence: Synthetic Linker
SSSSGSSSSGSSSSG

SEQ ID NO: 330 - protein, 20 aa, Artificial Sequence
  Description of Artificial Sequence: Synthetic Linker
SSSSGSSSSGSSSSGSSSSG

SEQ ID NO: 331 - protein, 25 aa, Artificial Sequence
  Description of Artificial Sequence: Synthetic Linker
SSSSGSSSSGSSSSGSSSSGSSSSG

SEQ ID NO: 332 - protein, 30 aa, Artificial Sequence
  Description of Artificial Sequence: Synthetic Linker
SSSSGSSSSGSSSSGSSSSGSSSSGSSSSG

SEQ ID NO: 333 - protein, 6 aa, Artificial Sequence
  Description of Artificial Sequence: Synthetic Linker
EFSTEF

SEQ ID NO: 334 - DNA, 18 bp, Artificial Sequence
  Description of Artificial Sequence: Synthetic Linker
gagttcagcaccgagttt

SEQ ID NO: 335 - DNA, 18 bp, Artificial Sequence
  Description of Artificial Sequence: Synthetic Linker
gagttctccaccgagttc

SEQ ID NO: 336 - protein, 5 aa, Artificial Sequence
  Description of Artificial Sequence: Synthetic Linker
SGGGS

SEQ ID NO: 337 - DNA, 15 bp, Artificial Sequence
  Description of Artificial Sequence: Synthetic Linker
agcggcggtggcagc

SEQ ID NO: 338 - protein, 12 aa, Artificial Sequence
  Description of Artificial Sequence: Synthetic Linker
GKSSGSGSESKS

SEQ ID NO: 339 - protein, 15 aa, Artificial Sequence
  Description of Artificial Sequence: Synthetic Linker
GGSTSGSGKSSEGKG

SEQ ID NO: 340 - protein, 19 aa, Artificial Sequence
  Description of Artificial Sequence: Synthetic Linker
GSTSGSGKSSSEGSGSTKG

SEQ ID NO: 341 - protein, 18 aa, Artificial Sequence
  Description of Artificial Sequence: Synthetic Linker
GSTSGSGKPGSGEGSTKG

SEQ ID NO: 342 - protein, 13 aa, Artificial Sequence
  Description of Artificial Sequence: Synthetic Linker
VDYPYDVPDYALD

SEQ ID NO: 343 - DNA, 39 bp, Artificial Sequence
  Description of Artificial Sequence: Synthetic Linker
gtcgactatccctacgatgttccggactacgcactggac

SEQ ID NO: 344 - protein, 14 aa, Artificial Sequence
  Description of Artificial Sequence: Synthetic Linker
EGKSSGSGSESKEF

SEQ ID NO: 345 - DNA, 45 bp, Artificial Sequence
  Description of Artificial Sequence: Synthetic Linker
ggaggaggaggatccggaggaggaggatctggcggcggcggcagc

SEQ ID NO: 346 - DNA, 45 bp, Artificial Sequence
  Description of Artificial Sequence: Synthetic Linker
ggaggaggaggatccggaggaggaggatctggcggaggaggcagc

SEQ ID NO: 347 - DNA, 45 bp, Artificial Sequence
  Description of Artificial Sequence: Synthetic Linker
ggaggaggaggaagcggaggaggaggatccggcggaggaggctct

SEQ ID NO: 348 - DNA, 45 bp, Artificial Sequence
  Description of Artificial Sequence: Synthetic Linker
ggcggcggcggctctggaggaggaggcagcggcggaggaggctcc

SEQ ID NO: 349 - DNA, 45 bp, Artificial Sequence
  Description of Artificial Sequence: Synthetic Linker
ggaggaggaggcagcggcggaggaggctccggcggcggcggctct

SEQ ID NO: 350 - protein, 35 aa, Artificial Sequence
  Description of Artificial Sequence: Synthetic Linker
SGGGSGGGGSGGGGSGGGGSGGGSLQYPYDVPDYA

SEQ ID NO: 351 - DNA, 105 bp, Artificial Sequence
  Description of Artificial Sequence: Synthetic Linker
tcaggtggcggtagtggtgggggaggatctggaggcggaggaagcgggggtggaggttcaggtggaggcagcttgcaatacccatacgatgttccagattacgct

SEQ ID NO: 352 - protein, 8 aa, Artificial Sequence
  Description of Artificial Sequence: Synthetic Linker
DYKDDDDK

SEQ ID NO: 353 - DNA, 24 bp, Artificial Sequence
  Description of Artificial Sequence: Synthetic Linker
gactacaaagacgatgacgacaag

SEQ ID NO: 354 - protein, 34 aa, Artificial Sequence
  Description of Artificial Sequence: Synthetic Linker
SGGGSGGGGSGGGGSGGGGSGGGGSGGGGSGGGS

SEQ ID NO: 355 - DNA, 102 bp, Artificial Sequence
  Description of Artificial Sequence: Synthetic Linker
tctggtggcgggagtggaggaggtgggtccggagggggagggagcggtggtggaggttccggcggggggggtagtggaggcggagggtcaggtgggggcagc

SEQ ID NO: 356 - protein, 34 aa, Artificial Sequence
  Description of Artificial Sequence: Synthetic Linker
SGGGSGGGGSGGGGSGGGGSYPYDVPDYASGGGS

SEQ ID NO: 357 - DNA, 102 bp, Artificial Sequence
  Description of Artificial Sequence: Synthetic Linker
agtggtggcgggtccggcggtggtggtagcgggggtggaggctcaggtggcggtggcagttatccttacgatgtgcccgactatgcttcaggcggggggagt

SEQ ID NO: 358 - protein, 22 aa, Artificial Sequence
  Description of Artificial Sequence: Synthetic Linker
GSGATNFSLLKQAGDVEENPGP

SEQ ID NO: 359 - DNA, 66 bp, Artificial Sequence
  Description of Artificial Sequence: Synthetic Linker
ggttcaggagctactaacttcagcctgctgaagcaggctggagacgtggaggagaaccctggacct

SEQ ID NO: 360 - protein, 22 aa, Artificial Sequence
  Description of Artificial Sequence: Synthetic Linker
SGGGGSGGGGSGGGGSGGGSLQ

SEQ ID NO: 361 - protein, 4 aa, Artificial Sequence
  Description of Artificial Sequence: Synthetic peptide
GGGG

SEQ ID NO: 362 - protein, 8 aa, Artificial Sequence
  Description of Artificial Sequence: Synthetic peptide
GGGGGGGG

SEQ ID NO: 363 - DNA, 603 bp, Artificial Sequence
  Description of Artificial Sequence: Synthetic Promoter sequence
aagcttgggagttccgcgttacataacttacggtaaatggcccgcctggctgaccgcccaacgacccccgcccattgacgtcaataatgacgtatgttcccatagtaacgccaatagggactttccattgacgtcaatgggtggagtatttacggtaaactgcccacttggcagtacatcaagtgtatcatatgccaagtacgccccctattgacgtcaatgacggtaaatggcccgcctggcattatgcccagtacatgaccttatgggactttcctacttggcagtacatctacgtattagtcatcgctattaccatggtgatgcggttttggcagtacatcaatgggcgtggatagcggtttgactcacggggatttccaagtctccaccccattgacgtcaatgggagtttgttttggcaccaaaatcaacgggactttccaaaatgtcgtaacaactccgccccattgacgcaaatgggcggtaggcgtgtacggtgggaggtctatataagcagagctcgtttagtgaaccgtcagatcgcctggagacgccatccacgctgttttgacctccatagaagacaccgactctactaga

SEQ ID NO: 364 - DNA, 399 bp, Artificial Sequence
  Description of Artificial Sequence: Synthetic Promoter sequence
ccggtaggcgccaaccggctccgttctttggtggccccttcgcgccaccttctactcctcccctagtcaggaagttcccccccgccccgcagctcgcgtcgtgcaggacgtgacaaatggaagtagcacgtctcactagtctcgtgcagatggacagcaccgctgagcaatggaagcgggtaggcctttggggcagcggccaatagcagctttgctccttcgctttctgggctcagaggctgggaaggggtgggtccgggggcgggctcaggggcgggctcaggggcggggcgggcgcccgaaggtcctccggaggcccggcattctgcacgcttcaaaagcgcacgtctgccgcgctgttctcctcttcctcatctccgggcctttcgacctgcagcc

SEQ ID NO: 365 - DNA, 1339 bp, Artificial Sequence
  Description of Artificial Sequence: Synthetic Promoter sequence
cgatagtaattcatacaaaaggactcgcccctgccttggggaatcccagggaccgtcgttaaactcccactaacgtagaacccagagatcgctgcgttcccgccccctcacccgcccgctctcgtcatcactgaggtggagaagagcatgcgtgaggctccggtgcccgtcagtgggcagagcgcacatcgcccacagtccccgagaagttggggggaggggtcggcaattgaaccggtgcctagagaaggtggcgcggggtaaactgggaaagtgatgtcgtgtactggctccgcctttttcccgagggtgggggagaaccgtatataagtgcagtagtcgccgtgaacgttctttttcgcaacgggtttgccgccagaacacaggtaagtgccgtgtgtggttcccgcgggcctggcctctttacgggttatggcccttgcgtgccttgaattacttccacgcccctggctgcagtacgtgattcttgatcccgagcttcgggttggaagtgggtgggagagttcgaggccttgcgcttaaggagccccttcgcctcgtgcttgagttgaggcctggcttgggcgctggggccgccgcgtgcgaatctggtggcaccttcgcgcctgtctcgctgctttcgataagtctctagccatttaaaatttttgatgacctgctgcgacgctttttttctggcaagatagtcttgtaaatgcgggccaagatctgcacactggtatttcggtttttggggccgcgggcggcgacggggcccgtgcgtcccagcgcacatgttcggcgaggcggggcctgcgagcgcggccaccgagaatcggacgggggtagtctcaagctggccggcctgctctggtgcctggcctcgcgccgccgtgtatcgccccgccctgggcggcaaggctggcccggtcggcaccagttgcgtgagcggaaagatggccgcttcccggccctgctgcagggagctcaaaatggaggacgcggcgctcgggagagcgggcgggtgagtcacccacacaaaggaaaagggcctttccgtcctcagccgtcgcttcatgtgactccacggagtaccgggcgccgtccaggcacctcgattagttctcgagcttttggagtacgtcgtctttaggttggggggaggggttttatgcgatggagtttccccacactgagtgggtggagactgaagttaggccagcttggcacttgatgtaattctccttggaatttgccctttttgagtttggatcttggttcattctcaagcctcagacagtggttcaaagtttttttcttccatttcaggtgtcgtgag

SEQ ID NO: 366 - DNA, 1335 bp, Artificial Sequence
  Description of Artificial Sequence: Synthetic Promoter sequence
gagtaattcatacaaaaggactcgcccctgccttggggaatcccagggaccgtcgttaaactcccactaacgtagaacccagagatcgctgcgttcccgccccctcacccgcccgctctcgtcatcactgaggtggagaagagcatgcgtgaggctccggtgcccgtcagtgggcagagcgcacatcgcccacagtccccgagaagttggggggaggggtcggcaattgaaccggtgcctagagaaggtggcgcggggtaaactgggaaagtgatgtcgtgtactggctccgcctttttcccgagggtgggggagaaccgtatataagtgcagtagtcgccgtgaacgttctttttcgcaacgggtttgccgccagaacacaggtaagtgccgtgtgtggttcccgcgggcctggcctctttacgggttatggcccttgcgtgccttgaattacttccacgcccctggctgcagtacgtgattcttgatcccgagcttcgggttggaagtgggtgggagagttcgaggccttgcgcttaaggagccccttcgcctcgtgcttgagttgaggcctggcttgggcgctggggccgccgcgtgcgaatctggtggcaccttcgcgcctgtctcgctgctttcgataagtctctagccatttaaaatttttgatgacctgctgcgacgctttttttctggcaagatagtcttgtaaatgcgggccaagatctgcacactggtatttcggtttttggggccgcgggcggcgacggggcccgtgcgtcccagcgcacatgttcggcgaggcggggcctgcgagcgcggccaccgagaatcggacgggggtagtctcaagctggccggcctgctctggtgcctggcctcgcgccgccgtgtatcgccccgccctgggcggcaaggctggcccggtcggcaccagttgcgtgagcggaaagatggccgcttcccggccctgctgcagggagctcaaaatggaggacgcggcgctcgggagagcgggcgggtgagtcacccacacaaaggaaaagggcctttccgtcctcagccgtcgcttcatgtgactccacggagtaccgggcgccgtccaggcacctcgattagttctcgagcttttggagtacgtcgtctttaggttggggggaggggttttatgcgatggagtttccccacactgagtgggtggagactgaagttaggccagcttggcacttgatgtaattctccttggaatttgccctttttgagtttggatcttggttcattctcaagcctcagacagtggttcaaagtttttttcttccatttcaggtgtcgtga

SEQ ID NO: 367 - DNA, 64 bp, Artificial Sequence
  Description of Artificial Sequence: Synthetic Signal Sequence
atggccctccctgtcaccgccctgctgcttccgctggctcttctgctccacgccgctcggcccc

SEQ ID NO: 368 - protein, 242 aa, Artificial Sequence
  Description of Artificial Sequence: Synthetic Payload sequence
EIVMTQSPATLSLSPGERATLSCRASQDISKYLNWYQQKPGQAPRLLIYHTSRLHSGIPARFSGSGSGTDYTLTISSLQPEDFAVYFCQQGNTLPYTFGQGTKLEIKGGGGSGGGGSGGGGSQVQLQESGPGLVKPSETLSLTCTVSGVSLPDYGVSWIRQPPGKGLEWIGVIWGSETTYYSSSLKSRVTISKDNSKNQVSLKLSSVTAADTAVYYCAKHYYYGGSYAMDYWGQGTLVTVSS

SEQ ID NO: 369 - DNA, 726 bp, Artificial Sequence
  Description of Artificial Sequence: Synthetic Payload sequence
gaaattgtgatgacccagtcacccgccactcttagcctttcacccggtgagcgcgcaaccctgtcttgcagagcctcccaagacatctcaaaataccttaattggtatcaacagaagcccggacaggctcctcgccttctgatctaccacaccagccggctccattctggaatccctgccaggttcagcggtagcggatctgggaccgactacaccctcactatcagctcactgcagccagaggacttcgctgtctatttctgtcagcaagggaacaccctgccctacacctttggacagggcaccaagctcgagattaaaggtggaggtggcagcggaggaggtgggtccggcggtggaggaagccaggtccaactccaagaaagcggaccgggtcttgtgaagccatcagaaactctttcactgacttgtactgtgagcggagtgtctctccccgattacggggtgtcttggatcagacagccaccggggaagggtctggaatggattggagtgatttggggctctgagactacttactactcttcatccctcaagtcacgcgtcaccatctcaaaggacaactctaagaatcaggtgtcactgaaactgtcatctgtgaccgcagccgacaccgccgtgtactattgcgctaagcattactattatggcgggagctacgcaatggattactggggacagggtactctggtcaccgtgtccagc

SEQ ID NO: 370 - DNA, 207 bp, Artificial Sequence
  Description of Artificial Sequence: Synthetic Payload sequence
accactaccccagcaccgaggccacccaccccggctcctaccatcgcctcccagcctctgtccctgcgtccggaggcatgtagacccgcagctggtggggccgtgcatacccggggtcttgacttcgcctgcgatatctacatttgggcccctctggctggtacttgcggggtcctgctgctttcactcgtgatcactctttactgt

SEQ ID NO: 371 - DNA, 126 bp, Artificial Sequence
  Description of Artificial Sequence: Synthetic Payload sequence
aagcgcggtcggaagaagctgctgtacatctttaagcaacccttcatgaggcctgtgcagactactcaagaggaggacggctgttcatgccggttcccagaggaggaggaaggcggctgcgaactg

SEQ ID NO: 372 - DNA, 336 bp, Artificial Sequence
  Description of Artificial Sequence: Synthetic Payload sequence
cgcgtgaaattcagccgcagcgcagatgctccagcctacaagcaggggcagaaccagctctacaacgaactcaatcttggtcggagagaggagtacgacgtgctggacaagcggagaggacgggacccagaaatgggcgggaagccgcgcagaaagaatccccaagagggcctgtacaacgagctccaaaaggataagatggcagaagcctatagcgagattggtatgaaaggggaacgcagaagaggcaaaggccacgacggactgtaccagggactcagcaccgccaccaaggacacctatgacgctcttcacatgcaggccctgccgcctcgg

SEQ ID NO: 373 - protein, 1294 aa, Artificial Sequence
  Description of Artificial Sequence: Synthetic Construct
MALPVTALLLPLALLLHAARPDIQMTQTTSSLSASLGDRVTISCRASQDISKYLNWYQQKPDGTVKLLIYHTSRLHSGVPSRFSGSGSGTDYSLTISNLEQEDIATYFCQQGNTLPYTFGGGTKLEITGGGGSGGGGSGGGGSEVKLQESGPGLVAPSQSLSVTCTVSGVSLPDYGVSWIRQPPRKGLEWLGVIWGSETTYYNSALKSRLTIIKDNSKSQVFLKMNSLQTDDTAIYYCAKHYYYGGSYAMDYWGQGTSVTVSSTTTPAPRPPTPAPTIASQPLSLRPEACRPAAGGAVHTRGLDFACDIYIWAPLAGTCGVLLLSLVITLYCKRGRKKLLYIFKQPFMRPVQTTQEEDGCSCRFPEEEEGGCELRVKFSRSADAPAYKQGQNQLYNELNLGRREEYDVLDKRRGRDPEMGGKPRRKNPQEGLYNELQKDKMAEAYSEIGMKGERRRGKGHDGLYQGLSTATKDTYDALHMQALPPRGSATNFSLLKQAGDVEENPGPMCHQQLVISWFSLVFLASPLVAIWELKKDVYVVELDWYPDAPGEMVVLTCDTPEEDGITWTLDQSSEVLGSGKTLTIQVKEFGDAGQYTCHKGGEVLSHSLLLLHKKEDGIWSTDILKDQKEPKNKTFLRCEAKNYSGRFTCWWLTTISTDLTFSVKSSRGSSDPQGVTCGAATLSAERVRGDNKEYEYSVECQEDSACPAAEESLPIEVMVDAVHKLKYENYTSSFFIRDIIKPDPPKNLQLKPLKNSRQVEVSWEYPDTWSTPHSYFSLTFCVQVQGKSKREKKDRVFTDKTSATVICRKNASISVRAQDRYYSSSWSEWASVPCSGGGGSGGGGSGGGGSRNLPVATPDPGMFPCLHHSQNLLRAVSNMLQKARQTLEFYPCTSEEIDHEDITKDKTSTVEACLPLELTKNESCLNSRETSFITNGSCLASRKTSFMMALCLSSIYEDLKMYQVEFKTMNAKLLMDPKRQIFLDQNMLAVIDELMQALNFNSETVPQKSSLEEPDFYKTKIKLCILLHAFRIRAVTIDRVMSYLNASGSSLALSLTADQMVSALLDAEPPILYSEYDPTRPFSEASMMGLLTNLADRELVHMINWAKRVPGFVDLTLHDQVHLLECAWMEILMIGLVWRSMEHPGKLLFAPNLLLDRTQGKCVEGGVEIFDMLLATSSRFRMMNLQGEEFVCLKSIILLNSGVYTFLSSTLKSLEEKDHIHRVLDKITDTLIHLMAKAGLTLQQQHQRLAQLLLILSHIRHMSNKRMEHLYSMKCKNVVPLSDLLLEMLDAHRL

SEQ ID NO: 374 - DNA, 3885 bp, Artificial Sequence
  Description of Artificial Sequence: Synthetic Construct
atggccttaccagtgaccgccttgctcctgccgctggccttgctgctccacgccgccaggccggacatccagatgacacagactacatcctccctgtctgcctctctgggagacagagtcaccatcagttgcagggcaagtcaggacattagtaaatatttaaattggtatcagcagaaaccagatggaactgttaaactcctgatctaccatacatcaagattacactcaggagtcccatcaaggttcagtggcagtgggtctggaacagattattctctcaccattagcaacctggagcaagaagatattgccacttacttttgccaacagggtaatacgcttccgtacacgttcggaggggggaccaagctggagatcacaggtggcggtggctcgggcggtggtgggtcgggtggcggcggatctgaggtgaaactgcaggagtcaggacctggcctggtggcgccctcacagagcctgtccgtcacatgcactgtctcaggggtctcattacccgactatggtgtaagctggattcgccagcctccacgaaagggtctggagtggctgggagtaatatggggtagtgaaaccacatactataattcagctctcaaatccagactgaccatcatcaaggacaactccaagagccaagttttcttaaaaatgaacagtctgcaaactgatgacacagccatttactactgtgccaaacattattactacggtggtagctatgctatggactactggggccaaggaacctcagtcaccgtctcctcaaccacgacgccagcgccgcgaccaccaacaccggcgcccaccatcgcgtcgcagcccctgtccctgcgcccagaggcgtgccggccagcggcggggggcgcagtgcacacgagggggctggacttcgcctgtgatatctacatctgggcgcccttggccgggacttgtggggtccttctcctgtcactggttatcaccctttactgcaaacggggcagaaagaaactcctgtatatattcaaacaaccatttatgagaccagtacaaactactcaagaggaagatggctgtagctgccgatttccagaagaagaagaaggaggatgtgaactgagagtgaagttcagcaggagcgcagacgcccccgcgtacaagcagggccagaaccagctctataacgagctcaatctaggacgaagagaggagtacgatgttttggacaagagacgtggccgggaccctgagatggggggaaagccgagaaggaagaaccctcaggaaggcctgtacaatgaactgcagaaagataagatggcggaggcctacagtgagattgggatgaaaggcgagcgccggaggggcaaggggcacgatggcctttaccagggtctcagtacagccaccaaggacacctacgacgcccttcacatgcaggccctgccccctcgcggatcagctactaacttcagcctgctgaagcaggctggagacgtggaggagaaccctggacctatgtgccaccaacagctcgtgatcagctggttctccctggtgttcctggctagccccctggtggccatctgggagctcaagaaagacgtgtacgtggtggaactggactggtaccccgacgcccctggcgaaatggtggtgctgacatgcgacacccctgaggaggatggcattacctggaccctcgatcagagctccgaggtgctgggcagcggcaaaaccctgaccatccaggtgaaggagtttggcgatgccggccagtacacatgtcacaagggcggcgaggtgctgagccactccctgctgctgctccacaagaaggaagatggcatctggagcaccgacattctgaaggatcagaaggagcccaagaacaagacattcctgaggtgtgaggccaagaactacagcggcaggtttacctgctggtggctgacaacaatcagcaccgacctcacattctccgtcaagtcctccaggggttcttccgaccctcaaggcgtgacatgcggcgctgccaccctgagcgctgagagagtcaggggcgacaacaaggagtacgagtacagcgtcgaatgtcaggaggacagcgcctgtcccgccgctgaagagagcctgcctatcgaggtgatggtggacgccgtgcacaaactgaagtatgagaattacacctccagcttcttcatcagggacatcatcaaacccgatccccccaagaacctgcagctgaagcctctgaagaacagcagacaggtcgaagtgtcctgggagtaccctgatacctggtccacaccccacagctacttcagcctgaccttttgcgtgcaggtgcagggcaagagcaaaagggagaagaaggacagggtgtttaccgacaagacctccgccacagtgatttgcagaaagaacgcctccatcagcgtgagggcccaggacaggtattacagcagctcctggagcgaatgggctagcgtgccctgtagcggaggaggaggcagcggaggaggaggttctggaggaggcggcagcagaaacctgcctgtcgctacccccgaccccggaatgttcccctgcctgcaccactcccagaacctcctgagggccgtgtccaacatgctgcagaaggctagacagaccctcgaattctacccctgtaccagcgaggagatcgaccatgaggacatcaccaaggataagaccagcaccgtggaggcttgcctgcctctggagctgaccaaaaacgagagctgcctgaacagcagggaaaccagcttcattaccaacggctcctgcctggcctccaggaagacatccttcatgatggccctgtgcctcagcagcatctacgaggacctgaagatgtatcaggtggagtttaagaccatgaatgccaagctgctgatggaccctaagaggcagatcttcctggaccagaatatgctggccgtgattgacgagctgatgcaggccctcaactttaacagcgagaccgtgccccagaaaagcagcctcgaagagcctgacttctacaaaaccaagattaagctgtgtatcctgctgcacgccttcaggatcagggccgtgaccatcgacagggtgatgagctacctgaacgccagcggatcctcactggcgctcagccttactgccgaccaaatggtatcagctcttctggacgcagaacccccaattctttattccgagtacgaccccacacgcccgttcagtgaagcttccatgatgggcctccttacgaaccttgccgaccgggaactcgtgcacatgatcaattgggcgaagcgggtgccggggttcgtagatttgacacttcacgaccaagttcatctcttggaatgtgcttggatggagatattgatgatcggactcgtgtggaggtcaatggagcatcctggtaaacttcttttcgcacccaatctgctcttggatagaacccagggtaagtgcgtcgagggtggcgttgaaatcttcgacatgctccttgcgacatccagccgattccgaatgatgaatcttcaaggagaggaatttgtctgtcttaagagcattatactcctcaatagtggagtttacaccttcttgtcctctacactgaaatcacttgaggaaaaagatcacatacatagggtgttggataaaatcacggatacactcatacatctgatggcaaaagcaggattgaccctgcaacagcagcaccaacgactggcccaactgctgttgatccttagccatatcagacacatgtctaacaaaaggatggaacatttgtacagcatgaaatgtaagaacgtagtgccactgtccgatttgttgctggaaatgctggacgctcatcggctctga

SEQ ID NO: 375 - protein, 1294 aa, Artificial Sequence
  Description of Artificial Sequence: Synthetic Construct
MALPVTALLLPLALLLHAARPDIQMTQTTSSLSASLGDRVTISCRASQDISKYLNWYQQKPDGTVKLLIYHTSRLHSGVPSRFSGSGSGTDYSLTISNLEQEDIATYFCQQGNTLPYTFGGGTKLEITGGGGSGGGGSGGGGSEVKLQESGPGLVAPSQSLSVTCTVSGVSLPDYGVSWIRQPPRKGLEWLGVIWGSETTYYNSALKSRLTIIKDNSKSQVFLKMNSLQTDDTAIYYCAKHYYYGGSYAMDYWGQGTSVTVSSTTTPAPRPPTPAPTIASQPLSLRPEACRPAAGGAVHTRGLDFACDIYIWAPLAGTCGVLLLSLVITLYCKRGRKKLLYIFKQPFMRPVQTTQEEDGCSCRFPEEEEGGCELRVKFSRSADAPAYKQGQNQLYNELNLGRREEYDVLDKRRGRDPEMGGKPRRKNPQEGLYNELQKDKMAEAYSEIGMKGERRRGKGHDGLYQGLSTATKDTYDALHMQALPPRGSATNFSLLKQAGDVEENPGPMCHQQLVISWFSLVFLASPLVAIWELKKDVYVVELDWYPDAPGEMVVLTCDTPEEDGITWTLDQSSEVLGSGKTLTIQVKEFGDAGQYTCHKGGEVLSHSLLLLHKKEDGIWSTDILKDQKEPKNKTFLRCEAKNYSGRFTCWWLTTISTDLTFSVKSSRGSSDPQGVTCGAATLSAERVRGDNKEYEYSVECQEDSACPAAEESLPIEVMVDAVHKLKYENYTSSFFIRDIIKPDPPKNLQLKPLKNSRQVEVSWEYPDTWSTPHSYFSLTFCVQVQGKSKREKKDRVFTDKTSATVICRKNASISVRAQDRYYSSSWSEWASVPCSGGGGSGGGGSGGGGSRNLPVATPDPGMFPCLHHSQNLLRAVSNMLQKARQTLEFYPCTSEEIDHEDITKDKTSTVEACLPLELTKNESCLNSRETSFITNGSCLASRKTSFMMALCLSSIYEDLKMYQVEFKTMNAKLLMDPKRQIFLDQNMLAVIDELMQALNFNSETVPQKSSLEEPDFYKTKIKLCILLHAFRIRAVTIDRVMSYLNASGSSLALSLTADQMVSALLDAEPPILYSEYDPTRPFSEASMMGLLTNLADRELVHMINWAKRVPGFVDLTLHDQVHLLECAWMEILMIGLVWRSMEHPGKLLFAPNLLLDRNQGKCVEGGVEIFDMLLATSSRFRMMNLQGEEFVCLKSIILLNSGVYTFLSSTLKSLEEKDHIHRVLDKITDTLIHLMAKAGLTLQQQHDRLAQLLLILSHIRHMSNKRMEHLYSMKCKNVVPLSDLLLEMLDAHRL

SEQ ID NO: 376 - DNA, 3885 bp, Artificial Sequence
  Description of Artificial Sequence: Synthetic Construct
atggccttaccagtgaccgccttgctcctgccgctggccttgctgctccacgccgccaggccggacatccagatgacacagactacatcctccctgtctgcctctctgggagacagagtcaccatcagttgcagggcaagtcaggacattagtaaatatttaaattggtatcagcagaaaccagatggaactgttaaactcctgatctaccatacatcaagattacactcaggagtcccatcaaggttcagtggcagtgggtctggaacagattattctctcaccattagcaacctggagcaagaagatattgccacttacttttgccaacagggtaatacgcttccgtacacgttcggaggggggaccaagctggagatcacaggtggcggtggctcgggcggtggtgggtcgggtggcggcggatctgaggtgaaactgcaggagtcaggacctggcctggtggcgccctcacagagcctgtccgtcacatgcactgtctcaggggtctcattacccgactatggtgtaagctggattcgccagcctccacgaaagggtctggagtggctgggagtaatatggggtagtgaaaccacatactataattcagctctcaaatccagactgaccatcatcaaggacaactccaagagccaagttttcttaaaaatgaacagtctgcaaactgatgacacagccatttactactgtgccaaacattattactacggtggtagctatgctatggactactggggccaaggaacctcagtcaccgtctcctcaaccacgacgccagcgccgcgaccaccaacaccggcgcccaccatcgcgtcgcagcccctgtccctgcgcccagaggcgtgccggccagcggcggggggcgcagtgcacacgagggggctggacttcgcctgtgatatctacatctgggcgcccttggccgggacttgtggggtccttctcctgtcactggttatcaccctttactgcaaacggggcagaaagaaactcctgtatatattcaaacaaccatttatgagaccagtacaaactactcaagaggaagatggctgtagctgccgatttccagaagaagaagaaggaggatgtgaactgagagtgaagttcagcaggagcgcagacgcccccgcgtacaagcagggccagaaccagctctataacgagctcaatctaggacgaagagaggagtacgatgttttggacaagagacgtggccgggaccctgagatggggggaaagccgagaaggaagaaccctcaggaaggcctgtacaatgaactgcagaaagataagatggcggaggcctacagtgagattgggatgaaaggcgagcgccggaggggcaaggggcacgatggcctttaccagggtctcagtacagccaccaaggacacctacgacgcccttcacatgcaggccctgccccctcgcggatcagctactaacttcagcctgctgaagcaggctggagacgtggaggagaaccctggacctatgtgccaccaacagctcgtgatcagctggttctccctggtgttcctggctagccccctggtggccatctgggagctcaagaaagacgtgtacgtggtggaactggactggtaccccgacgcccctggcgaaatggtggtgctgacatgcgacacccctgaggaggatggcattacctggaccctcgatcagagctccgaggtgctgggcagcggcaaaaccctgaccatccaggtgaaggagtttggcgatgccggccagtacacatgtcacaagggcggcgaggtgctgagccactccctgctgctgctccacaagaaggaagatggcatctggagcaccgacattctgaaggatcagaaggagcccaagaacaagacattcctgaggtgtgaggccaagaactacagcggcaggtttacctgctggtggctgacaacaatcagcaccgacctcacattctccgtcaagtcctccaggggttcttccgaccctcaaggcgtgacatgcggcgctgccaccctgagcgctgagagagtcaggggcgacaacaaggagtacgagtacagcgtcgaatgtcaggaggacagcgcctgtcccgccgctgaagagagcctgcctatcgaggtgatggtggacgccgtgcacaaactgaagtatgagaattacacctccagcttcttcatcagggacatcatcaaacccgatccccccaagaacctgcagctgaagcctctgaagaacagcagacaggtcgaagtgtcctgggagtaccctgatacctggtccacaccccacagctacttcagcctgaccttttgcgtgcaggtgcagggcaagagcaaaagggagaagaaggacagggtgtttaccgacaagacctccgccacagtgatttgcagaaagaacgcctccatcagcgtgagggcccaggacaggtattacagcagctcctggagcgaatgggctagcgtgccctgtagcggaggaggaggcagcggaggaggaggttctggaggaggcggcagcagaaacctgcctgtcgctacccccgaccccggaatgttcccctgcctgcaccactcccagaacctcctgagggccgtgtccaacatgctgcagaaggctagacagaccctcgaattctacccctgtaccagcgaggagatcgaccatgaggacatcaccaaggataagaccagcaccgtggaggcttgcctgcctctggagctgaccaaaaacgagagctgcctgaacagcagggaaaccagcttcattaccaacggctcctgcctggcctccaggaagacatccttcatgatggccctgtgcctcagcagcatctacgaggacctgaagatgtatcaggtggagtttaagaccatgaatgccaagctgctgatggaccctaagaggcagatcttcctggaccagaatatgctggccgtgattgacgagctgatgcaggccctcaactttaacagcgagaccgtgccccagaaaagcagcctcgaagagcctgacttctacaaaaccaagattaagctgtgtatcctgctgcacgccttcaggatcagggccgtgaccatcgacagggtgatgagctacctgaacgccagcggatcctcactggcgctcagccttactgccgaccaaatggtatcagctcttctggacgcagaacccccaattctttattccgagtacgaccccacacgcccgttcagtgaagcttccatgatgggcctccttacgaaccttgccgaccgggaactcgtgcacatgatcaattgggcgaagcgggtgccggggttcgtagatttgacacttcacgaccaagttcatctcttggaatgtgcttggatggagatattgatgatcggactcgtgtggaggtcaatggagcatcctggtaaacttcttttcgcacccaatctgctcttggatagaaatcagggtaagtgcgtcgagggtggcgttgaaatcttcgacatgctccttgcgacatccagccgattccgaatgatgaatcttcaaggagaggaatttgtctgtcttaagagcattatactcctcaatagtggagtttacaccttcttgtcctctacactgaaatcacttgaggaaaaagatcacatacatagggtgttggataaaatcacggatacactcatacatctgatggcaaaagcaggattgaccctgcaacagcagcacgaccgactggcccaactgctgttgatccttagccatatcagacacatgtctaacaaaaggatggaacatttgtacagcatgaaatgtaagaacgtagtgccactgtccgatttgttgctggaaatgctggacgctcatcggctctga

SEQ ID NO: 377 - protein, 1294 aa, Artificial Sequence
  Description of Artificial Sequence: Synthetic Construct
MALPVTALLLPLALLLHAARPDIQMTQTTSSLSASLGDRVTISCRASQDISKYLNWYQQKPDGTVKLLIYHTSRLHSGVPSRFSGSGSGTDYSLTISNLEQEDIATYFCQQGNTLPYTFGGGTKLEITGGGGSGGGGSGGGGSEVKLQESGPGLVAPSQSLSVTCTVSGVSLPDYGVSWIRQPPRKGLEWLGVIWGSETTYYNSALKSRLTIIKDNSKSQVFLKMNSLQTDDTAIYYCAKHYYYGGSYAMDYWGQGTSVTVSSTTTPAPRPPTPAPTIASQPLSLRPEACRPAAGGAVHTRGLDFACDIYIWAPLAGTCGVLLLSLVITLYCKRGRKKLLYIFKQPFMRPVQTTQEEDGCSCRFPEEEEGGCELRVKFSRSADAPAYKQGQNQLYNELNLGRREEYDVLDKRRGRDPEMGGKPRRKNPQEGLYNELQKDKMAEAYSEIGMKGERRRGKGHDGLYQGLSTATKDTYDALHMQALPPRGSATNFSLLKQAGDVEENPGPMCHQQLVISWFSLVFLASPLVAIWELKKDVYVVELDWYPDAPGEMVVLTCDTPEEDGITWTLDQSSEVLGSGKTLTIQVKEFGDAGQYTCHKGGEVLSHSLLLLHKKEDGIWSTDILKDQKEPKNKTFLRCEAKNYSGRFTCWWLTTISTDLTFSVKSSRGSSDPQGVTCGAATLSAERVRGDNKEYEYSVECQEDSACPAAEESLPIEVMVDAVHKLKYENYTSSFFIRDIIKPDPPKNLQLKPLKNSRQVEVSWEYPDTWSTPHSYFSLTFCVQVQGKSKREKKDRVFTDKTSATVICRKNASISVRAQDRYYSSSWSEWASVPCSGGGGSGGGGSGGGGSRNLPVATPDPGMFPCLHHSQNLLRAVSNMLQKARQTLEFYPCTSEEIDHEDITKDKTSTVEACLPLELTKNESCLNSRETSFITNGSCLASRKTSFMMALCLSSIYEDLKMYQVEFKTMNAKLLMDPKRQIFLDQNMLAVIDELMQALNFNSETVPQKSSLEEPDFYKTKIKLCILLHAFRIRAVTIDRVMSYLNASGSSLALSLTADQMVSALLDAEPPILYSEYDPTRPFSEASMMGLLTNLADRELVHMINWAKRVPGFVDLTLHDQVHLLECAWMEILMIGLVWRSMEHPGKLLFAPNLLLDRNQGKCVEGGVEIFDMLLATSSRFRMMNLQGEEFVCLKSIILLNSGVYTFLSSTLKSLEEKDHIHRVLDKITDTLIHLMAKAGLTLQQQHRRLAQLLLILSHIRHMSNKRMEHLYSMKCKNVVPLSDLLLEMLDAHRL

SEQ ID NO: 378 - DNA, 3885 bp, Artificial Sequence
  Description of Artificial Sequence: Synthetic Construct
atggccttaccagtgaccgccttgctcctgccgctggccttgctgctccacgccgccaggccggacatccagatgacacagactacatcctccctgtctgcctctctgggagacagagtcaccatcagttgcagggcaagtcaggacattagtaaatatttaaattggtatcagcagaaaccagatggaactgttaaactcctgatctaccatacatcaagattacactcaggagtcccatcaaggttcagtggcagtgggtctggaacagattattctctcaccattagcaacctggagcaagaagatattgccacttacttttgccaacagggtaatacgcttccgtacacgttcggaggggggaccaagctggagatcacaggtggcggtggctcgggcggtggtgggtcgggtggcggcggatctgaggtgaaactgcaggagtcaggacctggcctggtggcgccctcacagagcctgtccgtcacatgcactgtctcaggggtctcattacccgactatggtgtaagctggattcgccagcctccacgaaagggtctggagtggctgggagtaatatggggtagtgaaaccacatactataattcagctctcaaatccagactgaccatcatcaaggacaactccaagagccaagttttcttaaaaatgaacagtctgcaaactgatgacacagccatttactactgtgccaaacattattactacggtggtagctatgctatggactactggggccaaggaacctcagtcaccgtctcctcaaccacgacgccagcgccgcgaccaccaacaccggcgcccaccatcgcgtcgcagcccctgtccctgcgcccagaggcgtgccggccagcggcggggggcgcagtgcacacgagggggctggacttcgcctgtgatatctacatctgggcgcccttggccgggacttgtggggtccttctcctgtcactggttatcaccctttactgcaaacggggcagaaagaaactcctgtatatattcaaacaaccatttatgagaccagtacaaactactcaagaggaagatggctgtagctgccgatttccagaagaagaagaaggaggatgtgaactgagagtgaagttcagcaggagcgcagacgcccccgcgtacaagcagggccagaaccagctctataacgagctcaatctaggacgaagagaggagtacgatgttttggacaagagacgtggccgggaccctgagatggggggaaagccgagaaggaagaaccctcaggaaggcctgtacaatgaactgcagaaagataagatggcggaggcctacagtgagattgggatgaaaggcgagcgccggaggggcaaggggcacgatggcctttaccagggtctcagtacagccaccaaggacacctacgacgcccttcacatgcaggccctgccccctcgcggatcagctactaacttcagcctgctgaagcaggctggagacgtggaggagaaccctggacctatgtgccaccaacagctcgtgatcagctggttctccctggtgttcctggctagccccctggtggccatctgggagctcaagaaagacgtgtacgtggtggaactggactggtaccccgacgcccctggcgaaatggtggtgctgacatgcgacacccctgaggaggatggcattacctggaccctcgatcagagctccgaggtgctgggcagcggcaaaaccctgaccatccaggtgaaggagtttggcgatgccggccagtacacatgtcacaagggcggcgaggtgctgagccactccctgctgctgctccacaagaaggaagatggcatctggagcaccgacattctgaaggatcagaaggagcccaagaacaagacattcctgaggtgtgaggccaagaactacagcggcaggtttacctgctggtggctgacaacaatcagcaccgacctcacattctccgtcaagtcctccaggggttcttccgaccctcaaggcgtgacatgcggcgctgccaccctgagcgctgagagagtcaggggcgacaacaaggagtacgagtacagcgtcgaatgtcaggaggacagcgcctgtcccgccgctgaagagagcctgcctatcgaggtgatggtggacgccgtgcacaaactgaagtatgagaattacacctccagcttcttcatcagggacatcatcaaacccgatccccccaagaacctgcagctgaagcctctgaagaacagcagacaggtcgaagtgtcctgggagtaccctgatacctggtccacaccccacagctacttcagcctgaccttttgcgtgcaggtgcagggcaagagcaaaagggagaagaaggacagggtgtttaccgacaagacctccgccacagtgatttgcagaaagaacgcctccatcagcgtgagggcccaggacaggtattacagcagctcctggagcgaatgggctagcgtgccctgtagcggaggaggaggcagcggaggaggaggttctggaggaggcggcagcagaaacctgcctgtcgctacccccgaccccggaatgttcccctgcctgcaccactcccagaacctcctgagggccgtgtccaacatgctgcagaaggctagacagaccctcgaattctacccctgtaccagcgaggagatcgaccatgaggacatcaccaaggataagaccagcaccgtggaggcttgcctgcctctggagctgaccaaaaacgagagctgcctgaacagcagggaaaccagcttcattaccaacggctcctgcctggcctccaggaagacatccttcatgatggccctgtgcctcagcagcatctacgaggacctgaagatgtatcaggtggagtttaagaccatgaatgccaagctgctgatggaccctaagaggcagatcttcctggaccagaatatgctggccgtgattgacgagctgatgcaggccctcaactttaacagcgagaccgtgccccagaaaagcagcctcgaagagcctgacttctacaaaaccaagattaagctgtgtatcctgctgcacgccttcaggatcagggccgtgaccatcgacagggtgatgagctacctgaacgccagcggatcctcactggcgctcagccttactgccgaccaaatggtatcagctcttctggacgcagaacccccaattctttattccgagtacgaccccacacgcccgttcagtgaagcttccatgatgggcctccttacgaaccttgccgaccgggaactcgtgcacatgatcaattgggcgaagcgggtgccggggttcgtagatttgacacttcacgaccaagttcatctcttggaatgtgcttggatggagatattgatgatcggactcgtgtggaggtcaatggagcatcctggtaaacttcttttcgcacccaatctgctcttggatagaaatcagggtaagtgcgtcgagggtggcgttgaaatcttcgacatgctccttgcgacatccagccgattccgaatgatgaatcttcaaggagaggaatttgtctgtcttaagagcattatactcctcaatagtggagtttacaccttcttgtcctctacactgaaatcacttgaggaaaaagatcacatacatagggtgttggataaaatcacggatacactcatacatctgatggcaaaagcaggattgaccctgcaacagcagcaccgacgactggcccaactgctgttgatccttagccatatcagacacatgtctaacaaaaggatggaacatttgtacagcatgaaatgtaagaacgtagtgccactgtccgatttgttgctggaaatgctggacgctcatcggctctga

SEQ ID NO: 379 - DNA, 3709 bp, Artificial Sequence
  Description of Artificial Sequence: Synthetic Construct
atggccttaccagtgaccgccttgctcctgccgctggccttgctgctccacgccgccaggccggacatccagatgacacagactacatcctccctgtctgcctctctgggagacagagtcaccatcagttgcagggcaagtcaggacattagtaaatatttaaattggtatcagcagaaaccagatggaactgttaaactcctgatctaccatacatcaagattacactcaggagtcccatcaaggttcagtggcagtgggtctggaacagattattctctcaccattagcaacctggagcaagaagatattgccacttacttttgccaacagggtaatacgcttccgtacacgttcggaggggggaccaagctggagatcacaggtggcggtggctcgggcggtggtgggtcgggtggcggcggatctgaggtgaaactgcaggagtcaggacctggcctggtggcgccctcacagagcctgtccgtcacatgcactgtctcaggggtctcattacccgactatggtgtaagctggattcgccagcctccacgaaagggtctggagtggctgggagtaatatggggtagtgaaaccacatactataattcagctctcaaatccagactgaccatcatcaaggacaactccaagagccaagttttcttaaaaatgaacagtctgcaaactgatgacacagccatttactactgtgccaaacattattactacggtggtagctatgctatggactactggggccaaggaacctcagtcaccgtctcctcaaccacgacgccagcgccgcgaccaccaacaccggcgcccaccatcgcgtcgcagcccctgtccctgcgcccagaggcgtgccggccagcggcggggggcgcagtgcacacgagggggctggacttcgcctgtgatatctacatctgggcgcccttggccgggacttgtggggtccttctcctgtcactggttatcaccctttactgcaaacggggcagaaagaaactcctgtatatattcaaacaaccatttatgagaccagtacaaactactcaagaggaagatggctgtagctgccgatttccagaagaagaagaaggaggatgtgaactgagagtgaagttcagcaggagcgcagacgcccccgcgtacaagcagggccagaaccagctctataacgagctcaatctaggacgaagagaggagtacgatgttttggacaagagacgtggccgggaccctgagatggggggaaagccgagaaggaagaaccctcaggaaggcctgtacaatgaactgcagaaagataagatggcggaggcctacagtgagattgggatgaaaggcgagcgccggaggggcaaggggcacgatggcctttaccagggtctcagtacagccaccaaggacacctacgacgcccttcacatgcaggccctgccccctcgctaaatcgggctagccgcccctctccctcccccccccctaacgttactggccgaagccgcttggaataaggccggtgtgcgtttgtctatatgttattttccaccatattgccgtcttttggcaatgtgagggcccggaaacctggccctgtcttcttgacgagcattcctaggggtctttcccctctcgccaaaggaatgcaaggtctgttgaatgtcgtgaaggaagcagttcctctggaagcttcttgaagacaaacaacgtctgtagcgaccctttgcaggcagcggaaccccccacctggcgacaggtgcctctgcggccaaaagccacgtgtataagatacacctgcaaaggcggcacaaccccagtgccacgttgtgagttggatagttgtggaaagagtcaaatggctctcctcaagcgtattcaacaaggggctgaaggatgcccagaaggtaccccattgtatgggatctgatctggggcctcggtgcacatgctttacatgtgtttagtcgaggttaaaaaaacgtctaggccccccgaaccacggggacgtggttttcctttgaaaaacacgatgataagcttgccacaacccacaaggagacgaccttccatgtgccaccaacagctcgtgatcagctggttctccctggtgttcctggctagccccctggtggccatctgggagctcaagaaagacgtgtacgtggtggaactggactggtaccccgacgcccctggcgaaatggtggtgctgacatgcgacacccctgaggaggatggcattacctggaccctcgatcagagctccgaggtgctgggcagcggcaaaaccctgaccatccaggtgaaggagtttggcgatgccggccagtacacatgtcacaagggcggcgaggtgctgagccactccctgctgctgctccacaagaaggaagatggcatctggagcaccgacattctgaaggatcagaaggagcccaagaacaagacattcctgaggtgtgaggccaagaactacagcggcaggtttacctgctggtggctgacaacaatcagcaccgacctcacattctccgtcaagtcctccaggggttcttccgaccctcaaggcgtgacatgcggcgctgccaccctgagcgctgagagagtcaggggcgacaacaaggagtacgagtacagcgtcgaatgtcaggaggacagcgcctgtcccgccgctgaagagagcctgcctatcgaggtgatggtggacgccgtgcacaaactgaagtatgagaattacacctccagcttcttcatcagggacatcatcaaacccgatccccccaagaacctgcagctgaagcctctgaagaacagcagacaggtcgaagtgtcctgggagtaccctgatacctggtccacaccccacagctacttcagcctgaccttttgcgtgcaggtgcagggcaagagcaaaagggagaagaaggacagggtgtttaccgacaagacctccgccacagtgatttgcagaaagaacgcctccatcagcgtgagggcccaggacaggtattacagcagctcctggagcgaatgggctagcgtgccctgtagcggaggaggaggcagcggaggaggaggttctggaggaggcggcagcagaaacctgcctgtcgctacccccgaccccggaatgttcccctgcctgcaccactcccagaacctcctgagggccgtgtccaacatgctgcagaaggctagacagaccctcgaattctacccctgtaccagcgaggagatcgaccatgaggacatcaccaaggataagaccagcaccgtggaggcttgcctgcctctggagctgaccaaaaacgagagctgcctgaacagcagggaaaccagcttcattaccaacggctcctgcctggcctccaggaagacatccttcatgatggccctgtgcctcagcagcatctacgaggacctgaagatgtatcaggtggagtttaagaccatgaatgccaagctgctgatggaccctaagaggcagatcttcctggaccagaatatgctggccgtgattgacgagctgatgcaggccctcaactttaacagcgagaccgtgccccagaaaagcagcctcgaagagcctgacttctacaaaaccaagattaagctgtgtatcctgctgcacgccttcaggatcagggccgtgaccatcgacagggtgatgagctacctgaacgccagcggatcctaa

SEQ ID NO: 380 - protein, 486 aa, Artificial Sequence; identical to SEQ ID NO: 128
  Description of Artificial Sequence: Synthetic Construct

SEQ ID NO: 381 - DNA, 1461 bp, Artificial Sequence; identical to SEQ ID NO: 129
  Description of Artificial Sequence: Synthetic Construct

SEQ ID NO: 382 - protein, 542 aa, Artificial Sequence; identical to SEQ ID NO: 158
  Description of Artificial Sequence: Synthetic Construct

SEQ ID NO: 383 - DNA, 1629 bp, Artificial Sequence; identical to SEQ ID NO: 159
  Description of Artificial Sequence: Synthetic Construct

SEQ ID NO: 384 - protein, 1049 aa, Artificial Sequence
  Description of Artificial Sequence: Synthetic Construct
MALPVTALLLPLALLLHAARPDIQMTQTTSSLSASLGDRVTISCRASQDISKYLNWYQQKPDGTVKLLIYHTSRLHSGVPSRFSGSGSGTDYSLTISNLEQEDIATYFCQQGNTLPYTFGGGTKLEITGGGGSGGGGSGGGGSEVKLQESGPGLVAPSQSLSVTCTVSGVSLPDYGVSWIRQPPRKGLEWLGVIWGSETTYYNSALKSRLTIIKDNSKSQVFLKMNSLQTDDTAIYYCAKHYYYGGSYAMDYWGQGTSVTVSSTTTPAPRPPTPAPTIASQPLSLRPEACRPAAGGAVHTRGLDFACDIYIWAPLAGTCGVLLLSLVITLYCKRGRKKLLYIFKQPFMRPVQTTQEEDGCSCRFPEEEEGGCELRVKFSRSADAPAYKQGQNQLYNELNLGRREEYDVLDKRRGRDPEMGGKPRRKNPQEGLYNELQKDKMAEAYSEIGMKGERRRGKGHDGLYQGLSTATKDTYDALHMQALPPRGSATNFSLLKQAGDVEENPGPMCHQQLVISWFSLVFLASPLVAIWELKKDVYVVELDWYPDAPGEMVVLTCDTPEEDGITWTLDQSSEVLGSGKTLTIQVKEFGDAGQYTCHKGGEVLSHSLLLLHKKEDGIWSTDILKDQKEPKNKTFLRCEAKNYSGRFTCWWLTTISTDLTFSVKSSRGSSDPQGVTCGAATLSAERVRGDNKEYEYSVECQEDSACPAAEESLPIEVMVDAVHKLKYENYTSSFFIRDIIKPDPPKNLQLKPLKNSRQVEVSWEYPDTWSTPHSYFSLTFCVQVQGKSKREKKDRVFTDKTSATVICRKNASISVRAQDRYYSSSWSEWASVPCSGGGGSGGGGSGGGGSRNLPVATPDPGMFPCLHHSQNLLRAVSNMLQKARQTLEFYPCTSEEIDHEDITKDKTSTVEACLPLELTKNESCLNSRETSFITNGSCLASRKTSFMMALCLSSIYEDLKMYQVEFKTMNAKLLMDPKRQIFLDQNMLAVIDELMQALNFNSETVPQKSSLEEPDFYKTKIKLCILLHAFRIRAVTIDRVMSYLNASGS

SEQ ID NO: 385 - DNA, 3150 bp, Artificial Sequence
  Description of Artificial Sequence: Synthetic Construct
atggccttaccagtgaccgccttgctcctgccgctggccttgctgctccacgccgccaggccggacatccagatgacacagactacatcctccctgtctgcctctctgggagacagagtcaccatcagttgcagggcaagtcaggacattagtaaatatttaaattggtatcagcagaaaccagatggaactgttaaactcctgatctaccatacatcaagattacactcaggagtcccatcaaggttcagtggcagtgggtctggaacagattattctctcaccattagcaacctggagcaagaagatattgccacttacttttgccaacagggtaatacgcttccgtacacgttcggaggggggaccaagctggagatcacaggtggcggtggctcgggcggtggtgggtcgggtggcggcggatctgaggtgaaactgcaggagtcaggacctggcctggtggcgccctcacagagcctgtccgtcacatgcactgtctcaggggtctcattacccgactatggtgtaagctggattcgccagcctccacgaaagggtctggagtggctgggagtaatatggggtagtgaaaccacatactataattcagctctcaaatccagactgaccatcatcaaggacaactccaagagccaagttttcttaaaaatgaacagtctgcaaactgatgacacagccatttactactgtgccaaacattattactacggtggtagctatgctatggactactggggccaaggaacctcagtcaccgtctcctcaaccacgacgccagcgccgcgaccaccaacaccggcgcccaccatcgcgtcgcagcccctgtccctgcgcccagaggcgtgccggccagcggcggggggcgcagtgcacacgagggggctggacttcgcctgtgatatctacatctgggcgcccttggccgggacttgtggggtccttctcctgtcactggttatcaccctttactgcaaacggggcagaaagaaactcctgtatatattcaaacaaccatttatgagaccagtacaaactactcaagaggaagatggctgtagctgccgatttccagaagaagaagaaggaggatgtgaactgagagtgaagttcagcaggagcgcagacgcccccgcgtacaagcagggccagaaccagctctataacgagctcaatctaggacgaagagaggagtacgatgttttggacaagagacgtggccgggaccctgagatggggggaaagccgagaaggaagaaccctcaggaaggcctgtacaatgaactgcagaaagataagatggcggaggcctacagtgagattgggatgaaaggcgagcgccggaggggcaaggggcacgatggcctttaccagggtctcagtacagccaccaaggacacctacgacgcccttcacatgcaggccctgccccctcgcggatcagctactaacttcagcctgctgaagcaggctggagacgtggaggagaaccctggacctatgtgccaccaacagctcgtgatcagctggttctccctggtgttcctggctagccccctggtggccatctgggagctcaagaaagacgtgtacgtggtggaactggactggtaccccgacgcccctggcgaaatggtggtgctgacatgcgacacccctgaggaggatggcattacctggaccctcgatcagagctccgaggtgctgggcagcggcaaaaccctgaccatccaggtgaaggagtttggcgatgccggccagtacacatgtcacaagggcggcgaggtgctgagccactccctgctgctgctccacaagaaggaagatggcatctggagcaccgacattctgaaggatcagaaggagcccaagaacaagacattcctgaggtgtgaggccaagaactacagcggcaggtttacctgctggtggctgacaacaatcagcaccgacctcacattctccgtcaagtcctccaggggttcttccgaccctcaaggcgtgacatgcggcgctgccaccctgagcgctgagagagtcaggggcgacaacaaggagtacgagtacagcgtcgaatgtcaggaggacagcgcctgtcccgccgctgaagagagcctgcctatcgaggtgatggtggacgccgtgcacaaactgaagtatgagaattacacctccagcttcttcatcagggacatcatcaaacccgatccccccaagaacctgcagctgaagcctctgaagaacagcagacaggtcgaagtgtcctgggagtaccctgatacctggtccacaccccacagctacttcagcctgaccttttgcgtgcaggtgcagggcaagagcaaaagggagaagaaggacagggtgtttaccgacaagacctccgccacagtgatttgcagaaagaacgcctccatcagcgtgagggcccaggacaggtattacagcagctcctggagcgaatgggctagcgtgccctgtagcggaggaggaggcagcggaggaggaggttctggaggaggcggcagcagaaacctgcctgtcgctacccccgaccccggaatgttcccctgcctgcaccactcccagaacctcctgagggccgtgtccaacatgctgcagaaggctagacagaccctcgaattctacccctgtaccagcgaggagatcgaccatgaggacatcaccaaggataagaccagcaccgtggaggcttgcctgcctctggagctgaccaaaaacgagagctgcctgaacagcagggaaaccagcttcattaccaacggctcctgcctggcctccaggaagacatccttcatgatggccctgtgcctcagcagcatctacgaggacctgaagatgtatcaggtggagtttaagaccatgaatgccaagctgctgatggaccctaagaggcagatcttcctggaccagaatatgctggccgtgattgacgagctgatgcaggccctcaactttaacagcgagaccgtgccccagaaaagcagcctcgaagagcctgacttctacaaaaccaagattaagctgtgtatcctgctgcacgccttcaggatcagggccgtgaccatcgacagggtgatgagctacctgaacgccagcggatcctga

SEQ ID NO: 386 - protein, 486 aa, Artificial Sequence; identical to SEQ ID NO: 128
  Description of Artificial Sequence: Synthetic Construct

SEQ ID NO: 387 - DNA, 1461 bp, Artificial Sequence; identical to SEQ ID NO: 129
  Description of Artificial Sequence: Synthetic Construct

SEQ ID NO: 388 - protein, 733 aa, Artificial Sequence
  Description of Artificial Sequence: Synthetic Construct
MALPVTALLLPLALLLHAARPDIQMTQTTSSLSASLGDRVTISCRASQDISKYLNWYQQKPDGTVKLLIYHTSRLHSGVPSRFSGSGSGTDYSLTISNLEQEDIATYFCQQGNTLPYTFGGGTKLEITGGGGSGGGGSGGGGSEVKLQESGPGLVAPSQSLSVTCTVSGVSLPDYGVSWIRQPPRKGLEWLGVIWGSETTYYNSALKSRLTIIKDNSKSQVFLKMNSLQTDDTAIYYCAKHYYYGGSYAMDYWGQGTSVTVSSTTTPAPRPPTPAPTIASQPLSLRPEACRPAAGGAVHTRGLDFACDIYIWAPLAGTCGVLLLSLVITLYCKRGRKKLLYIFKQPFMRPVQTTQEEDGCSCRFPEEEEGGCELRVKFSRSADAPAYKQGQNQLYNELNLGRREEYDVLDKRRGRDPEMGGKPRRKNPQEGLYNELQKDKMAEAYSEIGMKGERRRGKGHDGLYQGLSTATKDTYDALHMQALPPRGSSLALSLTADQMVSALLDAEPPILYSEYDPTGPFSEASMMGLLTNLADRELVHMINWAKRVPGFVDLTLHDQVHLLECAWMEILMIGLVWRSMEHPGKLLFAPNLLLDRNQGKCVEGGVEIFDMLLATSSRFRMMNLQGEEFVCLKSIILLNSGVYTFLSSTLKSLEEKDHIHRVLDKITDTLIHLMAKAGLTLQQQHQRLAQLLLILSHIRHMSNKRMGHLYSMKCKNVVPLSDLLLEMLDTHRL

SEQ ID NO: 389 - DNA, 2202 bp, Artificial Sequence
  Description of Artificial Sequence: Synthetic Construct
atggccttaccagtgaccgccttgctcctgccgctggccttgctgctccacgccgccaggccggacatccagatgacacagactacatcctccctgtctgcctctctgggagacagagtcaccatcagttgcagggcaagtcaggacattagtaaatatttaaattggtatcagcagaaaccagatggaactgttaaactcctgatctaccatacatcaagattacactcaggagtcccatcaaggttcagtggcagtgggtctggaacagattattctctcaccattagcaacctggagcaagaagatattgccacttacttttgccaacagggtaatacgcttccgtacacgttcggaggggggaccaagctggagatcacaggtggcggtggctcgggcggtggtgggtcgggtggcggcggatctgaggtgaaactgcaggagtcaggacctggcctggtggcgccctcacagagcctgtccgtcacatgcactgtctcaggggtctcattacccgactatggtgtaagctggattcgccagcctccacgaaagggtctggagtggctgggagtaatatggggtagtgaaaccacatactataattcagctctcaaatccagactgaccatcatcaaggacaactccaagagccaagttttcttaaaaatgaacagtctgcaaactgatgacacagccatttactactgtgccaaacattattactacggtggtagctatgctatggactactggggccaaggaacctcagtcaccgtctcctcaaccacgacgccagcgccgcgaccaccaacaccggcgcccaccatcgcgtcgcagcccctgtccctgcgcccagaggcgtgccggccagcggcggggggcgcagtgcacacgagggggctggacttcgcctgtgatatctacatctgggcgcccttggccgggacttgtggggtccttctcctgtcactggttatcaccctttactgcaaacggggcagaaagaaactcctgtatatattcaaacaaccatttatgagaccagtacaaactactcaagaggaagatggctgtagctgccgatttccagaagaagaagaaggaggatgtgaactgagagtgaagttcagcaggagcgcagacgcccccgcgtacaagcagggccagaaccagctctataacgagctcaatctaggacgaagagaggagtacgatgttttggacaagagacgtggccgggaccctgagatggggggaaagccgagaaggaagaaccctcaggaaggcctgtacaatgaactgcagaaagataagatggcggaggcctacagtgagattgggatgaaaggcgagcgccggaggggcaaggggcacgatggcctttaccagggtctcagtacagccaccaaggacacctacgacgcccttcacatgcaggccctgccccctcgcggatcctcactggcgctcagccttactgccgaccaaatggtatcagctcttctggacgcagaacccccaattctttattccgagtacgaccccacaggcccgttcagtgaagcttccatgatgggcctccttacgaaccttgccgaccgggaactcgtgcacatgatcaattgggcgaagcgggtgccggggttcgtagatttgacacttcacgaccaagttcatctcttggaatgtgcttggatggagatattgatgatcggactcgtgtggaggtcaatggagcatcctggtaaacttcttttcgcacccaatctgctcttggatagaaatcagggtaagtgcgtcgagggtggcgttgaaatcttcgacatgctccttgcgacatccagccgattccgaatgatgaatcttcaaggagaggaatttgtctgtcttaagagcattatactcctcaatagtggagtttacaccttcttgtcctctacactgaaatcacttgaggaaaaagatcacatacatagggtgttggataaaatcacggatacactcatacatctgatggcaaaagcaggattgaccctgcaacagcagcaccaacgactggcccaactgctgttgatccttagccatatcagacacatgtctaacaaaaggatgggacatttgtacagcatgaaatgtaagaacgtagtgccactgtccgatttgttgctggaaatgctggacactcatcggctctaa

SEQ ID NO: 390 - protein, 733 aa, Artificial Sequence
  Description of Artificial Sequence: Synthetic Construct
MALPVTALLLPLALLLHAARPDIQMTQTTSSLSASLGDRVTISCRASQDISKYLNWYQQKPDGTVKLLIYHTSRLHSGVPSRFSGSGSGTDYSLTISNLEQEDIATYFCQQGNTLPYTFGGGTKLEITGGGGSGGGGSGGGGSEVKLQESGPGLVAPSQSLSVTCTVSGVSLPDYGVSWIRQPPRKGLEWLGVIWGSETTYYNSALKSRLTIIKDNSKSQVFLKMNSLQTDDTAIYYCAKHYYYGGSYAMDYWGQGTSVTVSSTTTPAPRPPTPAPTIASQPLSLRPEACRPAAGGAVHTRGLDFACDIYIWAPLAGTCGVLLLSLVITLYCKRGRKKLLYIFKQPFMRPVQTTQEEDGCSCRFPEEEEGGCELRVKFSRSADAPAYKQGQNQLYNELNLGRREEYDVLDKRRGRDPEMGGKPRRKNPQEGLYNELQKDKMAEAYSEIGMKGERRRGKGHDGLYQGLSTATKDTYDALHMQALPPRGSSLALSLTADQMVSALLDAEPPILYSEYDPTRPFSEASMMGLLTNLADRELVHMINWAKRVPGFVDLTLHDQVHLLECAWMEILMIGLVWRSMEHPGKLLFAPNLLLDRNQGKCVEGGVEIFDMLLAISSRFRMMNLQGEEFVCLKSIILLNSGVYTFLSSTLKSLEEKDHIHRVLDKITDTLIHLMAKAGLTLQQQHQRLAQLLLILSHIRHMSNKRMEHLYSMKCKNVVPLSDLLLEMLDAHRL

SEQ ID NO: 391 - DNA, 2202 bp, Artificial Sequence
  Description of Artificial Sequence: Synthetic Construct
atggccttaccagtgaccgccttgctcctgccgctggccttgctgctccacgccgccaggccggacatccagatgacacagactacatcctccctgtctgcctctctgggagacagagtcaccatcagttgcagggcaagtcaggacattagtaaatatttaaattggtatcagcagaaaccagatggaactgttaaactcctgatctaccatacatcaagattacactcaggagtcccatcaaggttcagtggcagtgggtctggaacagattattctctcaccattagcaacctggagcaagaagatattgccacttacttttgccaacagggtaatacgcttccgtacacgttcggaggggggaccaagctggagatcacaggtggcggtggctcgggcggtggtgggtcgggtggcggcggatctgaggtgaaactgcaggagtcaggacctggcctggtggcgccctcacagagcctgtccgtcacatgcactgtctcaggggtctcattacccgactatggtgtaagctggattcgccagcctccacgaaagggtctggagtggctgggagtaatatggggtagtgaaaccacatactataattcagctctcaaatccagactgaccatcatcaaggacaactccaagagccaagttttcttaaaaatgaacagtctgcaaactgatgacacagccatttactactgtgccaaacattattactacggtggtagctatgctatggactactggggccaaggaacctcagtcaccgtctcctcaaccacgacgccagcgccgcgaccaccaacaccggcgcccaccatcgcgtcgcagcccctgtccctgcgcccagaggcgtgccggccagcggcggggggcgcagtgcacacgagggggctggacttcgcctgtgatatctacatctgggcgcccttggccgggacttgtggggtccttctcctgtcactggttatcaccctttactgcaaacggggcagaaagaaactcctgtatatattcaaacaaccatttatgagaccagtacaaactactcaagaggaagatggctgtagctgccgatttccagaagaagaagaaggaggatgtgaactgagagtgaagttcagcaggagcgcagacgcccccgcgtacaagcagggccagaaccagctctataacgagctcaatctaggacgaagagaggagtacgatgttttggacaagagacgtggccgggaccctgagatggggggaaagccgagaaggaagaaccctcaggaaggcctgtacaatgaactgcagaaagataagatggcggaggcctacagtgagattgggatgaaaggcgagcgccggaggggcaaggggcacgatggcctttaccagggtctcagtacagccaccaaggacacctacgacgcccttcacatgcaggccctgccccctcgcggatcctcactggcgctcagccttactgccgaccaaatggtatcagctcttctggacgcagaacccccaattctttattccgagtacgaccccacacgcccgttcagtgaagcttccatgatgggcctccttacgaaccttgccgaccgggaactcgtgcacatgatcaattgggcgaagcgggtgccggggttcgtagatttgacacttcacgaccaagttcatctcttggaatgtgcttggatggagatattgatgatcggactcgtgtggaggtcaatggagcatcctggtaaacttcttttcgcacccaatctgctcttggatagaaatcagggtaagtgcgtcgagggtggcgttgaaatcttcgacatgctccttgcgatatccagccgattccgaatgatgaatcttcaaggagaggaatttgtctgtcttaagagcattatactcctcaatagtggagtttacaccttcttgtcctctacactgaaatcacttgaggaaaaagatcacatacatagggtgttggataaaatcacggatacactcatacatctgatggcaaaagcaggattgaccctgcaacagcagcaccaacgactggcccaactgctgttgatccttagccatatcagacacatgtctaacaaaaggatggaacatttgtacagcatgaaatgtaagaacgtagtgccactgtccgatttgttgctggaaatgctggacgctcatcggctctaa

SEQ ID NO: 392 - protein, 733 aa, Artificial Sequence
  Description of Artificial Sequence: Synthetic Construct
MALPVTALLLPLALLLHAARPDIQMTQTTSSLSASLGDRVTISCRASQDISKYLNWYQQKPDGTVKLLIYHTSRLHSGVPSRFSGSGSGTDYSLTISNLEQEDIATYFCQQGNTLPYTFGGGTKLEITGGGGSGGGGSGGGGSEVKLQESGPGLVAPSQSLSVTCTVSGVSLPDYGVSWIRQPPRKGLEWLGVIWGSETTYYNSALKSRLTIIKDNSKSQVFLKMNSLQTDDTAIYYCAKHYYYGGSYAMDYWGQGTSVTVSSTTTPAPRPPTPAPTIASQPLSLRPEACRPAAGGAVHTRGLDFACDIYIWAPLAGTCGVLLLSLVITLYCKRGRKKLLYIFKQPFMRPVQTTQEEDGCSCRFPEEEEGGCELRVKFSRSADAPAYKQGQNQLYNELNLGRREEYDVLDKRRGRDPEMGGKPRRKNPQEGLYNELQKDKMAEAYSEIGMKGERRRGKGHDGLYQGLSTATKDTYDALHMQALPPRGSSLALSLTADQMVSALLDAEPPILYSEYDPTRPFSEASMMGLLTNLADRELVHMINWAKRVPGFVDLTLHDQVHLLECAWMEILMIGLVWRSMEHPGKLLFAPNLLLDRDQGKCVEGGVEIFDMLLATSSRFRMMNLQGEEFVCLKSIILLNSGVYTFLSSTLKSLEEKDHIHRVLDKITDTLIHLMAKAGLTLQQQHQRLAQLLLILSHIRHMSNKRMEHLYSMKCKNVVPLSDLLLEMLDAHRL

SEQ ID NO: 393 - DNA, 2202 bp, Artificial Sequence
  Description of Artificial Sequence: Synthetic Construct
atggccttaccagtgaccgccttgctcctgccgctggccttgctgctccacgccgccaggccggacatccagatgacacagactacatcctccctgtctgcctctctgggagacagagtcaccatcagttgcagggcaagtcaggacattagtaaatatttaaattggtatcagcagaaaccagatggaactgttaaactcctgatctaccatacatcaagattacactcaggagtcccatcaaggttcagtggcagtgggtctggaacagattattctctcaccattagcaacctggagcaagaagatattgccacttacttttgccaacagggtaatacgcttccgtacacgttcggaggggggaccaagctggagatcacaggtggcggtggctcgggcggtggtgggtcgggtggcggcggatctgaggtgaaactgcaggagtcaggacctggcctggtggcgccctcacagagcctgtccgtcacatgcactgtctcaggggtctcattacccgactatggtgtaagctggattcgccagcctccacgaaagggtctggagtggctgggagtaatatggggtagtgaaaccacatactataattcagctctcaaatccagactgaccatcatcaaggacaactccaagagccaagttttcttaaaaatgaacagtctgcaaactgatgacacagccatttactactgtgccaaacattattactacggtggtagctatgctatggactactggggccaaggaacctcagtcaccgtctcctcaaccacgacgccagcgccgcgaccaccaacaccggcgcccaccatcgcgtcgcagcccctgtccctgcgcccagaggcgtgccggccagcggcggggggcgcagtgcacacgagggggctggacttcgcctgtgatatctacatctgggcgcccttggccgggacttgtggggtccttctcctgtcactggttatcaccctttactgcaaacggggcagaaagaaactcctgtatatattcaaacaaccatttatgagaccagtacaaactactcaagaggaagatggctgtagctgccgatttccagaagaagaagaaggaggatgtgaactgagagtgaagttcagcaggagcgcagacgcccccgcgtacaagcagggccagaaccagctctataacgagctcaatctaggacgaagagaggagtacgatgttttggacaagagacgtggccgggaccctgagatggggggaaagccgagaaggaagaaccctcaggaaggcctgtacaatgaactgcagaaagataagatggcggaggcctacagtgagattgggatgaaaggcgagcgccggaggggcaaggggcacgatggcctttaccagggtctcagtacagccaccaaggacacctacgacgcccttcacatgcaggccctgccccctcgcggatcctcactggcgctcagccttactgccgaccaaatggtatcagctcttctggacgcagaacccccaattctttattccgagtacgaccccacacgcccgttcagtgaagcttccatgatgggcctccttacgaaccttgccgaccgggaactcgtgcacatgatcaattgggcgaagcgggtgccggggttcgtagatttgacacttcacgaccaagttcatctcttggaatgtgcttggatggagatattgatgatcggactcgtgtggaggtcaatggagcatcctggtaaacttcttttcgcacccaatctgctcttggatagagatcagggtaagtgcgtcgagggtggcgttgaaatcttcgacatgctccttgcgacatccagccgattccgaatgatgaatcttcaaggagaggaatttgtctgtcttaagagcattatactcctcaatagtggagtttacaccttcttgtcctctacactgaaatcacttgaggaaaaagatcacatacatagggtgttggataaaatcacggatacactcatacatctgatggcaaaagcaggattgaccctgcaacagcagcaccaacgactggcccaactgctgttgatccttagccatatcagacacatgtctaacaaaaggatggaacatttgtacagcatgaaatgtaagaacgtagtgccactgtccgatttgttgctggaaatgctggacgctcatcggctctaa

SEQ ID NO: 394 - protein, 733 aa, Artificial Sequence
  Description of Artificial Sequence: Synthetic Construct
MALPVTALLLPLALLLHAARPDIQMTQTTSSLSASLGDRVTISCRASQDISKYLNWYQQKPDGTVKLLIYHTSRLHSGVPSRFSGSGSGTDYSLTISNLEQEDIATYFCQQGNTLPYTFGGGTKLEITGGGGSGGGGSGGGGSEVKLQESGPGLVAPSQSLSVTCTVSGVSLPDYGVSWIRQPPRKGLEWLGVIWGSETTYYNSALKSRLTIIKDNSKSQVFLKMNSLQTDDTAIYYCAKHYYYGGSYAMDYWGQGTSVTVSSTTTPAPRPPTPAPTIASQPLSLRPEACRPAAGGAVHTRGLDFACDIYIWAPLAGTCGVLLLSLVITLYCKRGRKKLLYIFKQPFMRPVQTTQEEDGCSCRFPEEEEGGCELRVKFSRSADAPAYKQGQNQLYNELNLGRREEYDVLDKRRGRDPEMGGKPRRKNPQEGLYNELQKDKMAEAYSEIGMKGERRRGKGHDGLYQGLSTATKDTYDALHMQALPPRGSSLALSLTADQMVSALLDAEPPILYSEYDPTRPFSEASMMGLLTNLADRELVHMINWAKRVPGFVDLTLHDQVHLLECAWMEILMIGLVWRSMEHPGKLLFAPNLLLDRNQGKCVEGGVEIFDMLLATSSRFRMMNLQGEEFVCLKSIILLNSGVYTFLSSTLKSLEEKDHIHRVLDKITDTLIHLMAKAGLTLQQQHQRLAQLLLILSHIRHMSSKRMEHLYSMKCKNVVPLSDLLLEMLDAHRL

SEQ ID NO: 395 - DNA, 2202 bp, Artificial Sequence
  Description of Artificial Sequence: Synthetic Construct
atggccttaccagtgaccgccttgctcctgccgctggccttgctgctccacgccgccaggccggacatccagatgacacagactacatcctccctgtctgcctctctgggagacagagtcaccatcagttgcagggcaagtcaggacattagtaaatatttaaattggtatcagcagaaaccagatggaactgttaaactcctgatctaccatacatcaagattacactcaggagtcccatcaaggttcagtggcagtgggtctggaacagattattctctcaccattagcaacctggagcaagaagatattgccacttacttttgccaacagggtaatacgcttccgtacacgttcggaggggggaccaagctggagatcacaggtggcggtggctcgggcggtggtgggtcgggtggcggcggatctgaggtgaaactgcaggagtcaggacctggcctggtggcgccctcacagagcctgtccgtcacatgcactgtctcaggggtctcattacccgactatggtgtaagctggattcgccagcctccacgaaagggtctggagtggctgggagtaatatggggtagtgaaaccacatactataattcagctctcaaatccagactgaccatcatcaaggacaactccaagagccaagttttcttaaaaatgaacagtctgcaaactgatgacacagccatttactactgtgccaaacattattactacggtggtagctatgctatggactactggggccaaggaacctcagtcaccgtctcctcaaccacgacgccagcgccgcgaccaccaacaccggcgcccaccatcgcgtcgcagcccctgtccctgcgcccagaggcgtgccggccagcggcggggggcgcagtgcacacgagggggctggacttcgcctgtgatatctacatctgggcgcccttggccgggacttgtggggtccttctcctgtcactggttatcaccctttactgcaaacggggcagaaagaaactcctgtatatattcaaacaaccatttatgagaccagtacaaactactcaagaggaagatggctgtagctgccgatttccagaagaagaagaaggaggatgtgaactgagagtgaagttcagcaggagcgcagacgcccccgcgtacaagcagggccagaaccagctctataacgagctcaatctaggacgaagagaggagtacgatgttttggacaagagacgtggccgggaccctgagatggggggaaagccgagaaggaagaaccctcaggaaggcctgtacaatgaactgcagaaagataagatggcggaggcctacagtgagattgggatgaaaggcgagcgccggaggggcaaggggcacgatggcctttaccagggtctcagtacagccaccaaggacacctacgacgcccttcacatgcaggccctgccccctcgcggatcctcactggcgctcagccttactgccgaccaaatggtatcagctcttctggacgcagaacccccaattctttattccgagtacgaccccacacgcccgttcagtgaagcttccatgatgggcctccttacgaaccttgccgaccgggaactcgtgcacatgatcaattgggcgaagcgggtgccggggttcgtagatttgacacttcacgaccaagttcatctcttggaatgtgcttggatggagatattgatgatcggactcgtgtggaggtcaatggagcatcctggtaaacttcttttcgcacccaatctgctcttggatagaaatcagggtaagtgcgtcgagggtggcgttgaaatcttcgacatgctccttgcgacatccagccgattccgaatgatgaatcttcaaggagaggaatttgtctgtcttaagagcattatactcctcaatagtggagtttacaccttcttgtcctctacactgaaatcacttgaggaaaaagatcacatacatagggtgttggataaaatcacggatacactcatacatctgatggcaaaagcaggattgaccctgcaacagcagcaccaacgactggcccaactgctgttgatccttagccatatcagacacatgtctagcaaaaggatggaacatttgtacagcatgaaatgtaagaacgtagtgccactgtccgatttgttgctggaaatgctggacgctcatcggctctaa

SEQ ID NO: 396 - protein, 733 aa, Artificial Sequence
  Description of Artificial Sequence: Synthetic Construct
MALPVTALLLPLALLLHAARPDIQMTQTTSSLSASLGDRVTISCRASQDISKYLNWYQQKPDGTVKLLIYHTSRLHSGVPSRFSGSGSGTDYSLTISNLEQEDIATYFCQQGNTLPYTFGGGTKLEITGGGGSGGGGSGGGGSEVKLQESGPGLVAPSQSLSVTCTVSGVSLPDYGVSWIRQPPRKGLEWLGVIWGSETTYYNSALKSRLTIIKDNSKSQVFLKMNSLQTDDTAIYYCAKHYYYGGSYAMDYWGQGTSVTVSSTTTPAPRPPTPAPTIASQPLSLRPEACRPAAGGAVHTRGLDFACDIYIWAPLAGTCGVLLLSLVITLYCKRGRKKLLYIFKQPFMRPVQTTQEEDGCSCRFPEEEEGGCELRVKFSRSADAPAYKQGQNQLYNELNLGRREEYDVLDKRRGRDPEMGGKPRRKNPQEGLYNELQKDKMAEAYSEIGMKGERRRGKGHDGLYQGLSTATKDTYDALHMQALPPRGSSLALSLTADQMVSALLDAEPPILYSEYDPTRPFSEASMMGLLTNLADRELVHMINWAKRVPGFVDLTLHDQVHLLECAWMEILMIGLVWRSMEHPGKLLFAPNLLLDRNQGKCVEGGVEIFDMLLATSSRFRMMNLQGEEFVCLKSIILLNSGVYTFLSSTLKSLEEKDHIHRVLDKITDTLIHLMAKAGLTLQQQHRRLAQLLLILSHIRHMSNKRMEHLYSMKCKNVVPLSDLLLEMLDAHRL

SEQ ID NO: 397 - DNA, 2202 bp, Artificial Sequence
  Description of Artificial Sequence: Synthetic Construct
atggccttaccagtgaccgccttgctcctgccgctggccttgctgctccacgccgccaggccggacatccagatgacacagactacatcctccctgtctgcctctctgggagacagagtcaccatcagttgcagggcaagtcaggacattagtaaatatttaaattggtatcagcagaaaccagatggaactgttaaactcctgatctaccatacatcaagattacactcaggagtcccatcaaggttcagtggcagtgggtctggaacagattattctctcaccattagcaacctggagcaagaagatattgccacttacttttgccaacagggtaatacgcttccgtacacgttcggaggggggaccaagctggagatcacaggtggcggtggctcgggcggtggtgggtcgggtggcggcggatctgaggtgaaactgcaggagtcaggacctggcctggtggcgccctcacagagcctgtccgtcacatgcactgtctcaggggtctcattacccgactatggtgtaagctggattcgccagcctccacgaaagggtctggagtggctgggagtaatatggggtagtgaaaccacatactataattcagctctcaaatccagactgaccatcatcaaggacaactccaagagccaagttttcttaaaaatgaacagtctgcaaactgatgacacagccatttactactgtgccaaacattattactacggtggtagctatgctatggactactggggccaaggaacctcagtcaccgtctcctcaaccacgacgccagcgccgcgaccaccaacaccggcgcccaccatcgcgtcgcagcccctgtccctgcgcccagaggcgtgccggccagcggcggggggcgcagtgcacacgagggggctggacttcgcctgtgatatctacatctgggcgcccttggccgggacttgtggggtccttctcctgtcactggttatcaccctttactgcaaacggggcagaaagaaactcctgtatatattcaaacaaccatttatgagaccagtacaaactactcaagaggaagatggctgtagctgccgatttccagaagaagaagaaggaggatgtgaactgagagtgaagttcagcaggagcgcagacgcccccgcgtacaagcagggccagaaccagctctataacgagctcaatctaggacgaagagaggagtacgatgttttggacaagagacgtggccgggaccctgagatggggggaaagccgagaaggaagaaccctcaggaaggcctgtacaatgaactgcagaaagataagatggcggaggcctacagtgagattgggatgaaaggcgagcgccggaggggcaaggggcacgatggcctttaccagggtctcagtacagccaccaaggacacctacgacgcccttcacatgcaggccctgccccctcgcggatcctcactggcgctcagccttactgccgaccaaatggtatcagctcttctggacgcagaacccccaattctttattccgagtacgaccccacacgcccgttcagtgaagcttccatgatgggcctccttacgaaccttgccgaccgggaactcgtgcacatgatcaattgggcgaagcgggtgccggggttcgtagatttgacacttcacgaccaagttcatctcttggaatgtgcttggatggagatattgatgatcggactcgtgtggaggtcaatggagcatcctggtaaacttcttttcgcacccaatctgctcttggatagaaatcagggtaagtgcgtcgagggtggcgttgaaatcttcgacatgctccttgcgacatccagccgattccgaatgatgaatcttcaaggagaggaatttgtctgtcttaagagcattatactcctcaatagtggagtttacaccttcttgtcctctacactgaaatcacttgaggaaaaagatcacatacatagggtgttggataaaatcacggatacactcatacatctgatggcaaaagcaggattgaccctgcaacagcagcaccgacgactggcccaactgctgttgatccttagccatatcagacacatgtctaacaaaaggatggaacatttgtacagcatgaaatgtaagaacgtagtgccactgtccgatttgttgctggaaatgctggacgctcatcggctctaa

SEQ ID NO: 398 - protein, 733 aa, Artificial Sequence
  Description of Artificial Sequence: Synthetic Construct
MALPVTALLLPLALLLHAARPDIQMTQTTSSLSASLGDRVTISCRASQDISKYLNWYQQKPDGTVKLLIYHTSRLHSGVPSRFSGSGSGTDYSLTISNLEQEDIATYFCQQGNTLPYTFGGGTKLEITGGGGSGGGGSGGGGSEVKLQESGPGLVAPSQSLSVTCTVSGVSLPDYGVSWIRQPPRKGLEWLGVIWGSETTYYNSALKSRLTIIKDNSKSQVFLKMNSLQTDDTAIYYCAKHYYYGGSYAMDYWGQGTSVTVSSTTTPAPRPPTPAPTIASQPLSLRPEACRPAAGGAVHTRGLDFACDIYIWAPLAGTCGVLLLSLVITLYCKRGRKKLLYIFKQPFMRPVQTTQEEDGCSCRFPEEEEGGCELRVKFSRSADAPAYKQGQNQLYNELNLGRREEYDVLDKRRGRDPEMGGKPRRKNPQEGLYNELQKDKMAEAYSEIGMKGERRRGKGHDGLYQGLSTATKDTYDALHMQALPPRGSSLALSLTADQMVSALLDAEPPILYSEYDPTRPFSEASMMGLLTNLADRELVHMINWAKRVPGFVDLALHDQVHLLECAWMEILMIGLVWRSMEHPGKLLFAPNLLLDRNQGKCVEGGVEIFDMLLATSSRFRMMNLQGEEFVCLKSIILLNSGVYTFLSSTLKSLEEKDHIHRVLDKITDTLIHLMAKAGLTLQQQHQRLAQLLLILSHIRHMSSKRMEHLYSMKCKNVVPLSDLLLEMLDAHRL

SEQ ID NO: 399 - DNA, 2202 bp, Artificial Sequence
  Description of Artificial Sequence: Synthetic Construct
atggccttaccagtgaccgccttgctcctgccgctggccttgctgctccacgccgccaggccggacatccagatgacacagactacatcctccctgtctgcctctctgggagacagagtcaccatcagttgcagggcaagtcaggacattagtaaatatttaaattggtatcagcagaaaccagatggaactgttaaactcctgatctaccatacatcaagattacactcaggagtcccatcaaggttcagtggcagtgggtctggaacagattattctctcaccattagcaacctggagcaagaagatattgccacttacttttgccaacagggtaatacgcttccgtacacgttcggaggggggaccaagctggagatcacaggtggcggtggctcgggcggtggtgggtcgggtggcggcggatctgaggtgaaactgcaggagtcaggacctggcctggtggcgccctcacagagcctgtccgtcacatgcactgtctcaggggtctcattacccgactatggtgtaagctggattcgccagcctccacgaaagggtctggagtggctgggagtaatatggggtagtgaaaccacatactataattcagctctcaaatccagactgaccatcatcaaggacaactccaagagccaagttttcttaaaaatgaacagtctgcaaactgatgacacagccatttactactgtgccaaacattattactacggtggtagctatgctatggactactggggccaaggaacctcagtcaccgtctcctcaaccacgacgccagcgccgcgaccaccaacaccggcgcccaccatcgcgtcgcagcccctgtccctgcgcccagaggcgtgccggccagcggcggggggcgcagtgcacacgagggggctggacttcgcctgtgatatctacatctgggcgcccttggccgggacttgtggggtccttctcctgtcactggttatcaccctttactgcaaacggggcagaaagaaactcctgtatatattcaaacaaccatttatgagaccagtacaaactactcaagaggaagatggctgtagctgccgatttccagaagaagaagaaggaggatgtgaactgagagtgaagttcagcaggagcgcagacgcccccgcgtacaagcagggccagaaccagctctataacgagctcaatctaggacgaagagaggagtacgatgttttggacaagagacgtggccgggaccctgagatggggggaaagccgagaaggaagaaccctcaggaaggcctgtacaatgaactgcagaaagataagatggcggaggcctacagtgagattgggatgaaaggcgagcgccggaggggcaaggggcacgatggcctttaccagggtctcagtacagccaccaaggacacctacgacgcccttcacatgcaggccctgccccctcgcggatcctcactggcgctcagccttactgccgaccaaatggtatcagctcttctggacgcagaacccccaattctttattccgagtacgaccccacacgcccgttcagtgaagcttccatgatgggcctccttacgaaccttgccgaccgggaactcgtgcacatgatcaattgggcgaagcgggtgccggggttcgtagatttggcacttcacgaccaagttcatctcttggaatgtgcttggatggagatattgatgatcggactcgtgtggaggtcaatggagcatcctggtaaacttcttttcgcacccaatctgctcttggatagaaatcagggtaagtgcgtcgagggtggcgttgaaatcttcgacatgctccttgcgacatccagccgattccgaatgatgaatcttcaaggagaggaatttgtctgtcttaagagcattatactcctcaatagtggagtttacaccttcttgtcctctacactgaaatcacttgaggaaaaagatcacatacatagggtgttggataaaatcacggatacactcatacatctgatggcaaaagcaggattgaccctgcaacagcagcaccaacgactggcccaactgctgttgatccttagccatatcagacacatgtctagcaaaaggatggaacatttgtacagcatgaaatgtaagaacgtagtgccactgtccgatttgttgctggaaatgctggacgctcatcggctctaa

SEQ ID NO: 400 - protein, 733 aa, Artificial Sequence
  Description of Artificial Sequence: Synthetic Construct
MALPVTALLLPLALLLHAARPDIQMTQTTSSLSASLGDRVTISCRASQDISKYLNWYQQKPDGTVKLLIYHTSRLHSGVPSRFSGSGSGTDYSLTISNLEQEDIATYFCQQGNTLPYTFGGGTKLEITGGGGSGGGGSGGGGSEVKLQESGPGLVAPSQSLSVTCTVSGVSLPDYGVSWIRQPPRKGLEWLGVIWGSETTYYNSALKSRLTIIKDNSKSQVFLKMNSLQTDDTAIYYCAKHYYYGGSYAMDYWGQGTSVTVSSTTTPAPRPPTPAPTIASQPLSLRPEACRPAAGGAVHTRGLDFACDIYIWAPLAGTCGVLLLSLVITLYCKRGRKKLLYIFKQPFMRPVQTTQEEDGCSCRFPEEEEGGCELRVKFSRSADAPAYKQGQNQLYNELNLGRREEYDVLDKRRGRDPEMGGKPRRKNPQEGLYNELQKDKMAEAYSEIGMKGERRRGKGHDGLYQGLSTATKDTYDALHMQALPPRGSNLALSLTADQMVSALLDAEPPILYSEYDPTRPFSEASMMGLLTNLADRELVHMINWAKRVPGFVDLTLHDQVHLLECAWMEILMIGLVWRSMEHPGKLLFAPNLLLDRNQGKCVEGGVEIFDMLLATSSRFRMMNLQVEEFVCLKSIILLNSGVYTFLSSTLKSLEEKDHIHRVLDKITDTLIHLMAKAGLTLQQQHQRLAQLLLILSHIRHMSNKRMEHLYSMKCKNVVPLSDLLLEMLDAHRL

SEQ ID NO: 401 - DNA, 2202 bp, Artificial Sequence
  Description of Artificial Sequence: Synthetic Construct
atggccttaccagtgaccgccttgctcctgccgctggccttgctgctccacgccgccaggccggacatccagatgacacagactacatcctccctgtctgcctctctgggagacagagtcaccatcagttgcagggcaagtcaggacattagtaaatatttaaattggtatcagcagaaaccagatggaactgttaaactcctgatctaccatacatcaagattacactcaggagtcccatcaaggttcagtggcagtgggtctggaacagattattctctcaccattagcaacctggagcaagaagatattgccacttacttttgccaacagggtaatacgcttccgtacacgttcggaggggggaccaagctggagatcacaggtggcggtggctcgggcggtggtgggtcgggtggcggcggatctgaggtgaaactgcaggagtcaggacctggcctggtggcgccctcacagagcctgtccgtcacatgcactgtctcaggggtctcattacccgactatggtgtaagctggattcgccagcctccacgaaagggtctggagtggctgggagtaatatggggtagtgaaaccacatactataattcagctctcaaatccagactgaccatcatcaaggacaactccaagagccaagttttcttaaaaatgaacagtctgcaaactgatgacacagccatttactactgtgccaaacattattactacggtggtagctatgctatggactactggggccaaggaacctcagtcaccgtctcctcaaccacgacgccagcgccgcgaccaccaacaccggcgcccaccatcgcgtcgcagcccctgtccctgcgcccagaggcgtgccggccagcggcggggggcgcagtgcacacgagggggctggacttcgcctgtgatatctacatctgggcgcccttggccgggacttgtggggtccttctcctgtcactggttatcaccctttactgcaaacggggcagaaagaaactcctgtatatattcaaacaaccatttatgagaccagtacaaactactcaagaggaagatggctgtagctgccgatttccagaagaagaagaaggaggatgtgaactgagagtgaagttcagcaggagcgcagacgcccccgcgtacaagcagggccagaaccagctctataacgagctcaatctaggacgaagagaggagtacgatgttttggacaagagacgtggccgggaccctgagatggggggaaagccgagaaggaagaaccctcaggaaggcctgtacaatgaactgcagaaagataagatggcggaggcctacagtgagattgggatgaaaggcgagcgccggaggggcaaggggcacgatggcctttaccagggtctcagtacagccaccaaggacacctacgacgcccttcacatgcaggccctgccccctcgcggatccaatctggcgctcagccttactgccgaccaaatggtatcagctcttctggacgcagaacccccaattctttattccgagtacgaccccacacgcccgttcagtgaagcttccatgatgggcctccttacgaaccttgccgaccgggaactcgtgcacatgatcaattgggcgaagcgggtgccggggttcgtagatttgacacttcacgaccaagttcatctcttggaatgtgcttggatggagatattgatgatcggactcgtgtggaggtcaatggagcatcctggtaaacttcttttcgcacccaatctgctcttggatagaaatcagggtaagtgcgtcgagggtggcgttgaaatcttcgacatgctccttgcgacatccagccgattccgaatgatgaatcttcaagtagaggaatttgtctgtcttaagagcattatactcctcaatagtggagtttacaccttcttgtcctctacactgaaatcacttgaggaaaaagatcacatacatagggtgttggataaaatcacggatacactcatacatctgatggcaaaagcaggattgaccctgcaacagcagcaccaacgactggcccaactgctgttgatccttagccatatcagacacatgtctaacaaaaggatggaacatttgtacagcatgaaatgtaagaacgtagtgccactgtccgatttgttgctggaaatgctggacgctcatcggctctaa

SEQ ID NO: 402 - protein, 733 aa, Artificial Sequence
  Description of Artificial Sequence: Synthetic Construct
MALPVTALLLPLALLLHAARPSLALSLTADQMVSALLDAEPPILYSEYDPTRPFSEASMMGLLTNLADRELVHMINWAKRVPGFVDLALHDQVHLLECAWMEILMIGLVWRSMEHPGKLLFAPNLLLDRNQGKCVEGGVEIFDMLLATSSRFRMMNLQGEEFVCLKSIILLNSGVYTFLSSTLKSLEEKDHIHRVLDKITDTLIHLMAKAGLTLQQQHQRLAQLLLILSHIRHMSSKRMEHLYSMKCKNVVPLSDLLLEMLDAHRLGSDIQMTQTTSSLSASLGDRVTISCRASQDISKYLNWYQQKPDGTVKLLIYHTSRLHSGVPSRFSGSGSGTDYSLTISNLEQEDIATYFCQQGNTLPYTFGGGTKLEITGGGGSGGGGSGGGGSEVKLQESGPGLVAPSQSLSVTCTVSGVSLPDYGVSWIRQPPRKGLEWLGVIWGSETTYYNSALKSRLTIIKDNSKSQVFLKMNSLQTDDTAIYYCAKHYYYGGSYAMDYWGQGTSVTVSSTTTPAPRPPTPAPTIASQPLSLRPEACRPAAGGAVHTRGLDFACDIYIWAPLAGTCGVLLLSLVITLYCKRGRKKLLYIFKQPFMRPVQTTQEEDGCSCRFPEEEEGGCELRVKFSRSADAPAYKQGQNQLYNELNLGRREEYDVLDKRRGRDPEMGGKPRRKNPQEGLYNELQKDKMAEAYSEIGMKGERRRGKGHDGLYQGLSTATKDTYDALHMQALPPR

SEQ ID NO: 403 - DNA, 2202 bp, Artificial Sequence
  Description of Artificial Sequence: Synthetic Construct
atggccttaccagtgaccgccttgctcctgccgctggccttgctgctccacgccgccaggccgtcactggcgctcagccttactgccgaccaaatggtatcagctcttctggacgcagaacccccaattctttattccgagtacgaccccacacgcccgttcagtgaagcttccatgatgggcctccttacgaaccttgccgaccgggaactcgtgcacatgatcaattgggcgaagcgggtgccggggttcgtagatttggcacttcacgaccaagttcatctcttggaatgtgcttggatggagatattgatgatcggactcgtgtggaggtcaatggagcatcctggtaaacttcttttcgcacccaatctgctcttggatagaaatcagggtaagtgcgtcgagggtggcgttgaaatcttcgacatgctccttgcgacatccagccgattccgaatgatgaatcttcaaggagaggaatttgtctgtcttaagagcattatactcctcaatagtggagtttacaccttcttgtcctctacactgaaatcacttgaggaaaaagatcacatacatagggtgttggataaaatcacggatacactcatacatctgatggcaaaagcaggattgaccctgcaacagcagcaccaacgactggcccaactgctgttgatccttagccatatcagacacatgtctagcaaaaggatggaacatttgtacagcatgaaatgtaagaacgtagtgccactgtccgatttgttgctggaaatgctggacgctcatcggctcggatccgacatccagatgacacagactacatcctccctgtctgcctctctgggagacagagtcaccatcagttgcagggcaagtcaggacattagtaaatatttaaattggtatcagcagaaaccagatggaactgttaaactcctgatctaccatacatcaagattacactcaggagtcccatcaaggttcagtggcagtgggtctggaacagattattctctcaccattagcaacctggagcaagaagatattgccacttacttttgccaacagggtaatacgcttccgtacacgttcggaggggggaccaagctggagatcacaggtggcggtggctcgggcggtggtgggtcgggtggcggcggatctgaggtgaaactgcaggagtcaggacctggcctggtggcgccctcacagagcctgtccgtcacatgcactgtctcaggggtctcattacccgactatggtgtaagctggattcgccagcctccacgaaagggtctggagtggctgggagtaatatggggtagtgaaaccacatactataattcagctctcaaatccagactgaccatcatcaaggacaactccaagagccaagttttcttaaaaatgaacagtctgcaaactgatgacacagccatttactactgtgccaaacattattactacggtggtagctatgctatggactactggggccaaggaacctcagtcaccgtctcctcaaccacgacgccagcgccgcgaccaccaacaccggcgcccaccatcgcgtcgcagcccctgtccctgcgcccagaggcgtgccggccagcggcggggggcgcagtgcacacgagggggctggacttcgcctgtgatatctacatctgggcgcccttggccgggacttgtggggtccttctcctgtcactggttatcaccctttactgcaaacggggcagaaagaaactcctgtatatattcaaacaaccatttatgagaccagtacaaactactcaagaggaagatggctgtagctgccgatttccagaagaagaagaaggaggatgtgaactgagagtgaagttcagcaggagcgcagacgcccccgcgtacaagcagggccagaaccagctctataacgagctcaatctaggacgaagagaggagtacgatgttttggacaagagacgtggccgggaccctgagatggggggaaagccgagaaggaagaaccctcaggaaggcctgtacaatgaactgcagaaagataagatggcggaggcctacagtgagattgggatgaaaggcgagcgccggaggggcaaggggcacgatggcctttaccagggtctcagtacagccaccaaggacacctacgacgcccttcacatgcaggccctgccccctcgctaa

SEQ ID NO: 404 - protein, 753 aa, Artificial Sequence
  Description of Artificial Sequence: Synthetic Construct
MALPVTALLLPLALLLHAARPRSSLALSLTADQMVSALLDAEPPILYSEYDPTRPFSEASMMGLLTNLADRELVHMINWAKRVPGFVDLALHDQVHLLECAWMEILMIGLVWRSMEHPGKLLFAPNLLLDRNQGKCVEGGVEIFDMLLATSSRFRMMNLQGEEFVCLKSIILLNSGVYTFLSSTLKSLEEKDHIHRVLDKITDTLIHLMAKAGLTLQQQHQRLAQLLLILSHIRHMSSKRMEHLYSMKCKNVVPLSDLLLEMLDAHRLGTGAEDPRPSRKRRSLGDVGEIVMTQSPATLSLSPGERATLSCRASQDISKYLNWYQQKPGQAPRLLIYHTSRLHSGIPARFSGSGSGTDYTLTISSLQPEDFAVYFCQQGNTLPYTFGQGTKLEIKGGGGSGGGGSGGGGSQVQLQESGPGLVKPSETLSLTCTVSGVSLPDYGVSWIRQPPGKGLEWIGVIWGSETTYYSSSLKSRVTISKDNSKNQVSLKLSSVTAADTAVYYCAKHYYYGGSYAMDYWGQGTLVTVSSTTTPAPRPPTPAPTIASQPLSLRPEACRPAAGGAVHTRGLDFACDIYIWAPLAGTCGVLLLSLVITLYCKRGRKKLLYIFKQPFMRPVQTTQEEDGCSCRFPEEEEGGCELRVKFSRSADAPAYKQGQNQLYNELNLGRREEYDVLDKRRGRDPEMGGKPRRKNPQEGLYNELQKDKMAEAYSEIGMKGERRRGKGHDGLYQGLSTATKDTYDALHMQALPPR

SEQ ID NO: 405 - DNA, 2262 bp, Artificial Sequence
  Description of Artificial Sequence: Synthetic Construct
atggccctccctgtcaccgccctgctgcttccgctggctcttctgctccacgccgctcggccccggtcgtcgttggcactttccctgactgccgaccagatggtgtccgcccttctggacgccgagcctccaattctgtactcggagtacgatccgactcgcccgttctccgaagccagcatgatgggcctgttgactaacctggcggaccgcgagttggtgcacatgattaactgggctaagcgggtgccgggcttcgtggacctggccctgcacgaccaagtgcacctcctggaatgcgcctggatggaaatcctcatgatcggcctcgtgtggagatccatggagcatcccggaaagctcctgtttgcacccaacctcctgcttgatcgcaaccagggaaaatgcgtggaagggggtgtcgagattttcgacatgctgctcgccacctcttcccggttccggatgatgaatctgcagggagaagagttcgtgtgtctgaagtcaatcatcctgctgaactccggggtctataccttcctgagctcgaccctcaagtcactggaggaaaaagaccacatccatcgcgtgctcgataagatcaccgacacccttatccatctcatggcgaaggctggactgaccctgcaacagcagcaccagaggctggcccagttgctgctgattctgagccacatccggcacatgtcgtccaagaggatggaacacctgtacagcatgaagtgcaagaacgtcgtgcctctgtccgatctgctcctggaaatgctggacgcgcacagactcggaaccggcgcggaagacccccggccctccaggaagcgaaggtccctcggagacgtgggtgaaattgtgatgacccagtcacccgccactcttagcctttcacccggtgagcgcgcaaccctgtcttgcagagcctcccaagacatctcaaaataccttaattggtatcaacagaagcccggacaggctcctcgccttctgatctaccacaccagccggctccattctggaatccctgccaggttcagcggtagcggatctgggaccgactacaccctcactatcagctcactgcagccagaggacttcgctgtctatttctgtcagcaagggaacaccctgccctacacctttggacagggcaccaagctcgagattaaaggtggaggtggcagcggaggaggtgggtccggcggtggaggaagccaggtccaactccaagaaagcggaccgggtcttgtgaagccatcagaaactctttcactgacttgtactgtgagcggagtgtctctccccgattacggggtgtcttggatcagacagccaccggggaagggtctggaatggattggagtgatttggggctctgagactacttactactcttcatccctcaagtcacgcgtcaccatctcaaaggacaactctaagaatcaggtgtcactgaaactgtcatctgtgaccgcagccgacaccgccgtgtactattgcgctaagcattactattatggcgggagctacgcaatggattactggggacagggtactctggtcaccgtgtccagcaccactaccccagcaccgaggccacccaccccggctcctaccatcgcctcccagcctctgtccctgcgtccggaggcatgtagacccgcagctggtggggccgtgcatacccggggtcttgacttcgcctgcgatatctacatttgggcccctctggctggtacttgcggggtcctgctgctttcactcgtgatcactctttactgtaagcgcggtcggaagaagctgctgtacatctttaagcaacccttcatgaggcctgtgcagactactcaagaggaggacggctgttcatgccggttcccagaggaggaggaaggcggctgcgaactgcgcgtgaaattcagccgcagcgcagatgctccagcctacaagcaggggcagaaccagctctacaacgaactcaatcttggtcggagagaggagtacgacgtgctggacaagcggagaggacgggacccagaaatgggcgggaagccgcgcagaaagaatccccaagagggcctgtacaacgagctccaaaaggataagatggcagaagcctatagcgagattggtatgaaaggggaacgcagaagaggcaaaggccacgacggactgtaccagggactcagcaccgccaccaaggacacctatgacgctcttcacatgcaggccctgccgcctcggtaa

SEQ ID NO: 406 - protein, 753 aa, Artificial Sequence
  Description of Artificial Sequence: Synthetic Construct
MALPVTALLLPLALLLHAARPRSSLALSLTADQMVSALLDAEPPILYSEYDPTRPFSEASMMGLLTNLADRELVHMINWAKRVPGFVDLTLHDQVHLLECAWMEILMIGLVWRSMEHPGKLLFAPNLLLDRNQGKCVEGGVEIFDMLLATSSRFRMMNLQGEEFVCLKSIILLNSGVYTFLSSTLKSLEEKDHIHRVLDKITDTLIHLMAKAGLTLQQQHQRLAQLLLILSHIRHMSNKRMEHLYSMKCKNVVPLSDLLLEMLDAHRLGTGAEDPRPSRKRRSLGDVGEIVMTQSPATLSLSPGERATLSCRASQDISKYLNWYQQKPGQAPRLLIYHTSRLHSGIPARFSGSGSGTDYTLTISSLQPEDFAVYFCQQGNTLPYTFGQGTKLEIKGGGGSGGGGSGGGGSQVQLQESGPGLVKPSETLSLTCTVSGVSLPDYGVSWIRQPPGKGLEWIGVIWGSETTYYSSSLKSRVTISKDNSKNQVSLKLSSVTAADTAVYYCAKHYYYGGSYAMDYWGQGTLVTVSSTTTPAPRPPTPAPTIASQPLSLRPEACRPAAGGAVHTRGLDFACDIYIWAPLAGTCGVLLLSLVITLYCKRGRKKLLYIFKQPFMRPVQTTQEEDGCSCRFPEEEEGGCELRVKFSRSADAPAYKQGQNQLYNELNLGRREEYDVLDKRRGRDPEMGGKPRRKNPQEGLYNELQKDKMAEAYSEIGMKGERRRGKGHDGLYQGLSTATKDTYDALHMQALPPR

SEQ ID NO: 407 - DNA, 2262 bp, Artificial Sequence
  Description of Artificial Sequence: Synthetic Construct
atggccctccctgtcaccgccctgctgcttccgctggctcttctgctccacgccgctcggccccggtcgtcgttggcactttccctgactgccgaccagatggtgtccgcccttctggacgccgagcctccaattctgtactcggagtacgatccgactcgcccgttctccgaagccagcatgatgggcctgttgactaacctggcggaccgcgagttggtgcacatgattaactgggctaagcgggtgccgggcttcgtggacctgaccctgcacgaccaagtgcacctcctggaatgcgcctggatggaaatcctcatgatcggcctcgtgtggagatccatggagcatcccggaaagctcctgtttgcacccaacctcctgcttgatcgcaaccagggaaaatgcgtggaagggggtgtcgagattttcgacatgctgctcgccacctcttcccggttccggatgatgaatctgcagggagaagagttcgtgtgtctgaagtcaatcatcctgctgaactccggggtctataccttcctgagctcgaccctcaagtcactggaggaaaaagaccacatccatcgcgtgctcgataagatcaccgacacccttatccatctcatggcgaaggctggactgaccctgcaacagcagcaccagaggctggcccagttgctgctgattctgagccacatccggcacatgtcgaacaagaggatggaacacctgtacagcatgaagtgcaagaacgtcgtgcctctgtccgatctgctcctggaaatgctggacgcgcacagactcggaaccggcgcggaagacccccggccctccaggaagcgaaggtccctcggagacgtgggtgaaattgtgatgacccagtcacccgccactcttagcctttcacccggtgagcgcgcaaccctgtcttgcagagcctcccaagacatctcaaaataccttaattggtatcaacagaagcccggacaggctcctcgccttctgatctaccacaccagccggctccattctggaatccctgccaggttcagcggtagcggatctgggaccgactacaccctcactatcagctcactgcagccagaggacttcgctgtctatttctgtcagcaagggaacaccctgccctacacctttggacagggcaccaagctcgagattaaaggtggaggtggcagcggaggaggtgggtccggcggtggaggaagccaggtccaactccaagaaagcggaccgggtcttgtgaagccatcagaaactctttcactgacttgtactgtgagcggagtgtctctccccgattacggggtgtcttggatcagacagccaccggggaagggtctggaatggattggagtgatttggggctctgagactacttactactcttcatccctcaagtcacgcgtcaccatctcaaaggacaactctaagaatcaggtgtcactgaaactgtcatctgtgaccgcagccgacaccgccgtgtactattgcgctaagcattactattatggcgggagctacgcaatggattactggggacagggtactctggtcaccgtgtccagcaccactaccccagcaccgaggccacccaccccggctcctaccatcgcctcccagcctctgtccctgcgtccggaggcatgtagacccgcagctggtggggccgtgcatacccggggtcttgacttcgcctgcgatatctacatttgggcccctctggctggtacttgcggggtcctgctgctttcactcgtgatcactctttactgtaagcgcggtcggaagaagctgctgtacatctttaagcaacccttcatgaggcctgtgcagactactcaagaggaggacggctgttcatgccggttcccagaggaggaggaaggcggctgcgaactgcgcgtgaaattcagccgcagcgcagatgctccagcctacaagcaggggcagaaccagctctacaacgaactcaatcttggtcggagagaggagtacgacgtgctggacaagcggagaggacgggacccagaaatgggcgggaagccgcgcagaaagaatccccaagagggcctgtacaacgagctccaaaaggataagatggcagaagcctatagcgagattggtatgaaaggggaacgcagaagaggcaaaggccacgacggactgtaccagggactcagcaccgccaccaaggacacctatgacgctcttcacatgcaggccctgccgcctcggtaa

SEQ ID NO: 408 - protein, 20 aa, Artificial Sequence
  Description of Artificial Sequence: Synthetic Signal Sequence
ALPVTALLLPLALLLHAARP

SEQ ID NO: 409 - DNA, 60 bp, Artificial Sequence
  Description of Artificial Sequence: Synthetic Signal Sequence
gccttaccagtgaccgccttgctcctgccgctggccttgctgctccacgccgccaggccg

SEQ ID NO: 410 - protein, 747 aa, Artificial Sequence
  Description of Artificial Sequence: Synthetic Construct
MALPVTALLLPLALLLHAARPGSSLALSLTADQMVSALLDAEPPILYSEYDPTRPFSEASMMGLLTNLADRELVHMINWAKRVPGFVDLTLHDQVHLLECAWMEILMIGLVWRSMEHPGKLLFAPNLLLDRNQGKCVEGGVEIFDMLLATSSRFRMMNLQGEEFVCLKSIILLNSGVYTFLSSTLKSLEEKDHIHRVLDKITDTLIHLMAKAGLTLQQQHQRLAQLLLILSHIRHMSSKRMEHLYSMKCKNVVPLSDLLLEMLDAHRLGSESRRVRRNKRSKDIQMTQTTSSLSASLGDRVTISCRASQDISKYLNWYQQKPDGTVKLLIYHTSRLHSGVPSRFSGSGSGTDYSLTISNLEQEDIATYFCQQGNTLPYTFGGGTKLEITGGGGSGGGGSGGGGSEVKLQESGPGLVAPSQSLSVTCTVSGVSLPDYGVSWIRQPPRKGLEWLGVIWGSETTYYNSALKSRLTIIKDNSKSQVFLKMNSLQTDDTAIYYCAKHYYYGGSYAMDYWGQGTSVTVSSTTTPAPRPPTPAPTIASQPLSLRPEACRPAAGGAVHTRGLDFACDIYIWAPLAGTCGVLLLSLVITLYCKRGRKKLLYIFKQPFMRPVQTTQEEDGCSCRFPEEEEGGCELRVKFSRSADAPAYKQGQNQLYNELNLGRREEYDVLDKRRGRDPEMGGKPRRKNPQEGLYNELQKDKMAEAYSEIGMKGERRRGKGHDGLYQGLSTATKDTYDALHMQALPPR

SEQ ID NO: 411 - DNA, 2244 bp, Artificial Sequence
  Description of Artificial Sequence: Synthetic Construct
atggccttaccagtgaccgccttgctcctgccgctggccttgctgctccacgccgccaggccgggatcctcactggcgctcagccttactgccgaccaaatggtatcagctcttctggacgcagaacccccaattctttattccgagtacgaccccacacgcccgttcagtgaagcttccatgatgggcctccttacgaaccttgccgaccgggaactcgtgcacatgatcaattgggcgaagcgggtgccggggttcgtagatttgacacttcacgaccaagttcatctcttggaatgtgcttggatggagatattgatgatcggactcgtgtggaggtcaatggagcatcctggtaaacttcttttcgcacccaatctgctcttggatagaaatcagggtaagtgcgtcgagggtggcgttgaaatcttcgacatgctccttgcgacatccagccgattccgaatgatgaatcttcaaggagaggaatttgtctgtcttaagagcattatactcctcaatagtggagtttacaccttcttgtcctctacactgaaatcacttgaggaaaaagatcacatacatagggtgttggataaaatcacggatacactcatacatctgatggcaaaagcaggattgaccctgcaacagcagcaccaacgactggcccaactgctgttgatccttagccatatcagacacatgtctagcaaaaggatggaacatttgtacagcatgaaatgtaagaacgtagtgccactgtccgatttgttgctggaaatgctggacgctcatcggctcggatccgagtccaggagagtgcggcgcaacaagaggagcaaggacatccagatgacacagactacatcctccctgtctgcctctctgggagacagagtcaccatcagttgcagggcaagtcaggacattagtaaatatttaaattggtatcagcagaaaccagatggaactgttaaactcctgatctaccatacatcaagattacactcaggagtcccatcaaggttcagtggcagtgggtctggaacagattattctctcaccattagcaacctggagcaagaagatattgccacttacttttgccaacagggtaatacgcttccgtacacgttcggaggggggaccaagctggagatcacaggtggcggtggctcgggcggtggtgggtcgggtggcggcggatctgaggtgaaactgcaggagtcaggacctggcctggtggcgccctcacagagcctgtccgtcacatgcactgtctcaggggtctcattacccgactatggtgtaagctggattcgccagcctccacgaaagggtctggagtggctgggagtaatatggggtagtgaaaccacatactataattcagctctcaaatccagactgaccatcatcaaggacaactccaagagccaagttttcttaaaaatgaacagtctgcaaactgatgacacagccatttactactgtgccaaacattattactacggtggtagctatgctatggactactggggccaaggaacctcagtcaccgtctcctcaaccacgacgccagcgccgcgaccaccaacaccggcgcccaccatcgcgtcgcagcccctgtccctgcgcccagaggcgtgccggccagcggcggggggcgcagtgcacacgagggggctggacttcgcctgtgatatctacatctgggcgcccttggccgggacttgtggggtccttctcctgtcactggttatcaccctttactgcaaacggggcagaaagaaactcctgtatatattcaaacaaccatttatgagaccagtacaaactactcaagaggaagatggctgtagctgccgatttccagaagaagaagaaggaggatgtgaactgagagtgaagttcagcaggagcgcagacgcccccgcgtacaagcagggccagaaccagctctataacgagctcaatctaggacgaagagaggagtacgatgttttggacaagagacgtggccgggaccctgagatggggggaaagccgagaaggaagaaccctcaggaaggcctgtacaatgaactgcagaaagataagatggcggaggcctacagtgagattgggatgaaaggcgagcgccggaggggcaaggggcacgatggcctttaccagggtctcagtacagccaccaaggacacctacgacgcccttcacatgcaggccctgccccctcgctaa

SEQ ID NO: 412 - protein, 747 aa, Artificial Sequence
  Description of Artificial Sequence: Synthetic Construct
MALPVTALLLPLALLLHAARPGSSLALSLTADQMVSALLDAEPPILYSEYDPTRPFSEASMMGLLTNLADRELVHMINWAKRVPGFVDLTLHDQVHLLECAWMEILMIGLVWRSMEHPGKLLFAPNLLLDRNQGKCVEGGVEIFDMLLATSSRFRMMNLQGEEFVCLKSIILLNSGVYTFLSSTLKSLEEKDHIHRVLDKITDTLIHLMAKAGLTLQQQHRRLAQLLLILSHIRHMSNKRMEHLYSMKCKNVVPLSDLLLEMLDAHRLGSESRRVRRNKRSKDIQMTQTTSSLSASLGDRVTISCRASQDISKYLNWYQQKPDGTVKLLIYHTSRLHSGVPSRFSGSGSGTDYSLTISNLEQEDIATYFCQQGNTLPYTFGGGTKLEITGGGGSGGGGSGGGGSEVKLQESGPGLVAPSQSLSVTCTVSGVSLPDYGVSWIRQPPRKGLEWLGVIWGSETTYYNSALKSRLTIIKDNSKSQVFLKMNSLQTDDTAIYYCAKHYYYGGSYAMDYWGQGTSVTVSSTTTPAPRPPTPAPTIASQPLSLRPEACRPAAGGAVHTRGLDFACDIYIWAPLAGTCGVLLLSLVITLYCKRGRKKLLYIFKQPFMRPVQTTQEEDGCSCRFPEEEEGGCELRVKFSRSADAPAYKQGQNQLYNELNLGRREEYDVLDKRRGRDPEMGGKPRRKNPQEGLYNELQKDKMAEAYSEIGMKGERRRGKGHDGLYQGLSTATKDTYDALHMQALPPR

SEQ ID NO: 413 - DNA, 2244 bp, Artificial Sequence
  Description of Artificial Sequence: Synthetic Construct
atggccttaccagtgaccgccttgctcctgccgctggccttgctgctccacgccgccaggccgggatcctcactggcgctcagccttactgccgaccaaatggtatcagctcttctggacgcagaacccccaattctttattccgagtacgaccccacacgcccgttcagtgaagcttccatgatgggcctccttacgaaccttgccgaccgggaactcgtgcacatgatcaattgggcgaagcgggtgccggggttcgtagatttgacacttcacgaccaagttcatctcttggaatgtgcttggatggagatattgatgatcggactcgtgtggaggtcaatggagcatcctggtaaacttcttttcgcacccaatctgctcttggatagaaatcagggtaagtgcgtcgagggtggcgttgaaatcttcgacatgctccttgcgacatccagccgattccgaatgatgaatcttcaaggagaggaatttgtctgtcttaagagcattatactcctcaatagtggagtttacaccttcttgtcctctacactgaaatcacttgaggaaaaagatcacatacatagggtgttggataaaatcacggatacactcatacatctgatggcaaaagcaggattgaccctgcaacagcagcaccgacgactggcccaactgctgttgatccttagccatatcagacacatgtctaacaaaaggatggaacatttgtacagcatgaaatgtaagaacgtagtgccactgtccgatttgttgctggaaatgctggacgctcatcggctcggatccgagtccaggagagtgcggcgcaacaagaggagcaaggacatccagatgacacagactacatcctccctgtctgcctctctgggagacagagtcaccatcagttgcagggcaagtcaggacattagtaaatatttaaattggtatcagcagaaaccagatggaactgttaaactcctgatctaccatacatcaagattacactcaggagtcccatcaaggttcagtggcagtgggtctggaacagattattctctcaccattagcaacctggagcaagaagatattgccacttacttttgccaacagggtaatacgcttccgtacacgttcggaggggggaccaagctggagatcacaggtggcggtggctcgggcggtggtgggtcgggtggcggcggatctgaggtgaaactgcaggagtcaggacctggcctggtggcgccctcacagagcctgtccgtcacatgcactgtctcaggggtctcattacccgactatggtgtaagctggattcgccagcctccacgaaagggtctggagtggctgggagtaatatggggtagtgaaaccacatactataattcagctctcaaatccagactgaccatcatcaaggacaactccaagagccaagttttcttaaaaatgaacagtctgcaaactgatgacacagccatttactactgtgccaaacattattactacggtggtagctatgctatggactactggggccaaggaacctcagtcaccgtctcctcaaccacgacgccagcgccgcgaccaccaacaccggcgcccaccatcgcgtcgcagcccctgtccctgcgcccagaggcgtgccggccagcggcggggggcgcagtgcacacgagggggctggacttcgcctgtgatatctacatctgggcgcccttggccgggacttgtggggtccttctcctgtcactggttatcaccctttactgcaaacggggcagaaagaaactcctgtatatattcaaacaaccatttatgagaccagtacaaactactcaagaggaagatggctgtagctgccgatttccagaagaagaagaaggaggatgtgaactgagagtgaagttcagcaggagcgcagacgcccccgcgtacaagcagggccagaaccagctctataacgagctcaatctaggacgaagagaggagtacgatgttttggacaagagacgtggccgggaccctgagatggggggaaagccgagaaggaagaaccctcaggaaggcctgtacaatgaactgcagaaagataagatggcggaggcctacagtgagattgggatgaaaggcgagcgccggaggggcaaggggcacgatggcctttaccagggtctcagtacagccaccaaggacacctacgacgcccttcacatgcaggccctgccccctcgctaa

SEQ ID NO: 414 - protein, 747 aa, Artificial Sequence
  Description of Artificial Sequence: Synthetic Construct
MALPVTALLLPLALLLHAARPGSSLALSLTADQMVSALLDAEPPILYSEYDPTGPFSEASMMGLLTNLADRELVHMINWAKRVPGFVDLTLHDQVHLLECAWMEILMIGLVWRSMEHPGKLLFAPNLLLDRNQGKCVEGGVEIFDMLLATSSRFRMMNLQGEEFVCLKSIILLNSGVYTFLSSTLKSLEEKDHIHRVLDKITDTLIHLMAKAGLTLQQQHQRLAQLLLILSHIRHMSNKRMGHLYSMKCKNVVPLSDLLLEMLDTHRLGSESRRVRRNKRSKDIQMTQTTSSLSASLGDRVTISCRASQDISKYLNWYQQKPDGTVKLLIYHTSRLHSGVPSRFSGSGSGTDYSLTISNLEQEDIATYFCQQGNTLPYTFGGGTKLEITGGGGSGGGGSGGGGSEVKLQESGPGLVAPSQSLSVTCTVSGVSLPDYGVSWIRQPPRKGLEWLGVIWGSETTYYNSALKSRLTIIKDNSKSQVFLKMNSLQTDDTAIYYCAKHYYYGGSYAMDYWGQGTSVTVSSTTTPAPRPPTPAPTIASQPLSLRPEACRPAAGGAVHTRGLDFACDIYIWAPLAGTCGVLLLSLVITLYCKRGRKKLLYIFKQPFMRPVQTTQEEDGCSCRFPEEEEGGCELRVKFSRSADAPAYKQGQNQLYNELNLGRREEYDVLDKRRGRDPEMGGKPRRKNPQEGLYNELQKDKMAEAYSEIGMKGERRRGKGHDGLYQGLSTATKDTYDALHMQALPPR

SEQ ID NO: 415 - DNA, 2244 bp, Artificial Sequence
  Description of Artificial Sequence: Synthetic Construct
atggccttaccagtgaccgccttgctcctgccgctggccttgctgctccacgccgccaggccgggatcctcactggcgctcagccttactgccgaccaaatggtatcagctcttctggacgcagaacccccaattctttattccgagtacgaccccacaggcccgttcagtgaagcttccatgatgggcctccttacgaaccttgccgaccgggaactcgtgcacatgatcaattgggcgaagcgggtgccggggttcgtagatttgacacttcacgaccaagttcatctcttggaatgtgcttggatggagatattgatgatcggactcgtgtggaggtcaatggagcatcctggtaaacttcttttcgcacccaatctgctcttggatagaaatcagggtaagtgcgtcgagggtggcgttgaaatcttcgacatgctccttgcgacatccagccgattccgaatgatgaatcttcaaggagaggaatttgtctgtcttaagagcattatactcctcaatagtggagtttacaccttcttgtcctctacactgaaatcacttgaggaaaaagatcacatacatagggtgttggataaaatcacggatacactcatacatctgatggcaaaagcaggattgaccctgcaacagcagcaccaacgactggcccaactgctgttgatccttagccatatcagacacatgtctaacaaaaggatgggacatttgtacagcatgaaatgtaagaacgtagtgccactgtccgatttgttgctggaaatgctggacactcatcggctcggatccgagtccaggagagtgcggcgcaacaagaggagcaaggacatccagatgacacagactacatcctccctgtctgcctctctgggagacagagtcaccatcagttgcagggcaagtcaggacattagtaaatatttaaattggtatcagcagaaaccagatggaactgttaaactcctgatctaccatacatcaagattacactcaggagtcccatcaaggttcagtggcagtgggtctggaacagattattctctcaccattagcaacctggagcaagaagatattgccacttacttttgccaacagggtaatacgcttccgtacacgttcggaggggggaccaagctggagatcacaggtggcggtggctcgggcggtggtgggtcgggtggcggcggatctgaggtgaaactgcaggagtcaggacctggcctggtggcgccctcacagagcctgtccgtcacatgcactgtctcaggggtctcattacccgactatggtgtaagctggattcgccagcctccacgaaagggtctggagtggctgggagtaatatggggtagtgaaaccacatactataattcagctctcaaatccagactgaccatcatcaaggacaactccaagagccaagttttcttaaaaatgaacagtctgcaaactgatgacacagccatttactactgtgccaaacattattactacggtggtagctatgctatggactactggggccaaggaacctcagtcaccgtctcctcaaccacgacgccagcgccgcgaccaccaacaccggcgcccaccatcgcgtcgcagcccctgtccctgcgcccagaggcgtgccggccagcggcggggggcgcagtgcacacgagggggctggacttcgcctgtgatatctacatctgggcgcccttggccgggacttgtggggtccttctcctgtcactggttatcaccctttactgcaaacggggcagaaagaaactcctgtatatattcaaacaaccatttatgagaccagtacaaactactcaagaggaagatggctgtagctgccgatttccagaagaagaagaaggaggatgtgaactgagagtgaagttcagcaggagcgcagacgcccccgcgtacaagcagggccagaaccagctctataacgagctcaatctaggacgaagagaggagtacgatgttttggacaagagacgtggccgggaccctgagatggggggaaagccgagaaggaagaaccctcaggaaggcctgtacaatgaactgcagaaagataagatggcggaggcctacagtgagattgggatgaaaggcgagcgccggaggggcaaggggcacgatggcctttaccagggtctcagtacagccaccaaggacacctacgacgcccttcacatgcaggccctgccccctcgctaa

SEQ ID NO: 416 - protein, 747 aa, Artificial Sequence
  Description of Artificial Sequence: Synthetic Construct
MALPVTALLLPLALLLHAARPGSSLALSLTADQMVSALLDAEPPILYSEYDPTRPFSEASMMGLLTNLADRELVHMINWAKRVPGFVDLTLHDQVHLLECAWMEILMIGLVWRSMEHPGKLLFAPNLLLDRNQGKCVEGGVEIFDMLLAISSRFRMMNLQGEEFVCLKSIILLNSGVYTFLSSTLKSLEEKDHIHRVLDKITDTLIHLMAKAGLTLQQQHQRLAQLLLILSHIRHMSNKRMEHLYSMKCKNVVPLSDLLLEMLDAHRLGSESRRVRRNKRSKDIQMTQTTSSLSASLGDRVTISCRASQDISKYLNWYQQKPDGTVKLLIYHTSRLHSGVPSRFSGSGSGTDYSLTISNLEQEDIATYFCQQGNTLPYTFGGGTKLEITGGGGSGGGGSGGGGSEVKLQESGPGLVAPSQSLSVTCTVSGVSLPDYGVSWIRQPPRKGLEWLGVIWGSETTYYNSALKSRLTIIKDNSKSQVFLKMNSLQTDDTAIYYCAKHYYYGGSYAMDYWGQGTSVTVSSTTTPAPRPPTPAPTIASQPLSLRPEACRPAAGGAVHTRGLDFACDIYIWAPLAGTCGVLLLSLVITLYCKRGRKKLLYIFKQPFMRPVQTTQEEDGCSCRFPEEEEGGCELRVKFSRSADAPAYKQGQNQLYNELNLGRREEYDVLDKRRGRDPEMGGKPRRKNPQEGLYNELQKDKMAEAYSEIGMKGERRRGKGHDGLYQGLSTATKDTYDALHMQALPPR

SEQ ID NO: 417 - DNA, 2244 bp, Artificial Sequence
  Description of Artificial Sequence: Synthetic Construct
atggccttaccagtgaccgccttgctcctgccgctggccttgctgctccacgccgccaggccgggatcctcactggcgctcagccttactgccgaccaaatggtatcagctcttctggacgcagaacccccaattctttattccgagtacgaccccacacgcccgttcagtgaagcttccatgatgggcctccttacgaaccttgccgaccgggaactcgtgcacatgatcaattgggcgaagcgggtgccggggttcgtagatttgacacttcacgaccaagttcatctcttggaatgtgcttggatggagatattgatgatcggactcgtgtggaggtcaatggagcatcctggtaaacttcttttcgcacccaatctgctcttggatagaaatcagggtaagtgcgtcgagggtggcgttgaaatcttcgacatgctccttgcgatatccagccgattccgaatgatgaatcttcaaggagaggaatttgtctgtcttaagagcattatactcctcaatagtggagtttacaccttcttgtcctctacactgaaatcacttgaggaaaaagatcacatacatagggtgttggataaaatcacggatacactcatacatctgatggcaaaagcaggattgaccctgcaacagcagcaccaacgactggcccaactgctgttgatccttagccatatcagacacatgtctaacaaaaggatggaacatttgtacagcatgaaatgtaagaacgtagtgccactgtccgatttgttgctggaaatgctggacgctcatcggctcggatccgagtccaggagagtgcggcgcaacaagaggagcaaggacatccagatgacacagactacatcctccctgtctgcctctctgggagacagagtcaccatcagttgcagggcaagtcaggacattagtaaatatttaaattggtatcagcagaaaccagatggaactgttaaactcctgatctaccatacatcaagattacactcaggagtcccatcaaggttcagtggcagtgggtctggaacagattattctctcaccattagcaacctggagcaagaagatattgccacttacttttgccaacagggtaatacgcttccgtacacgttcggaggggggaccaagctggagatcacaggtggcggtggctcgggcggtggtgggtcgggtggcggcggatctgaggtgaaactgcaggagtcaggacctggcctggtggcgccctcacagagcctgtccgtcacatgcactgtctcaggggtctcattacccgactatggtgtaagctggattcgccagcctccacgaaagggtctggagtggctgggagtaatatggggtagtgaaaccacatactataattcagctctcaaatccagactgaccatcatcaaggacaactccaagagccaagttttcttaaaaatgaacagtctgcaaactgatgacacagccatttactactgtgccaaacattattactacggtggtagctatgctatggactactggggccaaggaacctcagtcaccgtctcctcaaccacgacgccagcgccgcgaccaccaacaccggcgcccaccatcgcgtcgcagcccctgtccctgcgcccagaggcgtgccggccagcggcggggggcgcagtgcacacgagggggctggacttcgcctgtgatatctacatctgggcgcccttggccgggacttgtggggtccttctcctgtcactggttatcaccctttactgcaaacggggcagaaagaaactcctgtatatattcaaacaaccatttatgagaccagtacaaactactcaagaggaagatggctgtagctgccgatttccagaagaagaagaaggaggatgtgaactgagagtgaagttcagcaggagcgcagacgcccccgcgtacaagcagggccagaaccagctctataacgagctcaatctaggacgaagagaggagtacgatgttttggacaagagacgtggccgggaccctgagatggggggaaagccgagaaggaagaaccctcaggaaggcctgtacaatgaactgcagaaagataagatggcggaggcctacagtgagattgggatgaaaggcgagcgccggaggggcaaggggcacgatggcctttaccagggtctcagtacagccaccaaggacacctacgacgcccttcacatgcaggccctgccccctcgctaa

SEQ ID NO: 418 - protein, 747 aa, Artificial Sequence
  Description of Artificial Sequence: Synthetic Construct
MALPVTALLLPLALLLHAARPGSSLALSLTADQMVSALLDAEPPILYSEYDPTRPFSEASMMGLLTNLADRELVHMINWAKRVPGFVDLTLHDQVHLLECAWMEILMIGLVWRSMEHPGKLLFAPNLLLDRDQGKCVEGGVEIFDMLLATSSRFRMMNLQGEEFVCLKSIILLNSGVYTFLSSTLKSLEEKDHIHRVLDKITDTLIHLMAKAGLTLQQQHQRLAQLLLILSHIRHMSNKRMEHLYSMKCKNVVPLSDLLLEMLDAHRLGSESRRVRRNKRSKDIQMTQTTSSLSASLGDRVTISCRASQDISKYLNWYQQKPDGTVKLLIYHTSRLHSGVPSRFSGSGSGTDYSLTISNLEQEDIATYFCQQGNTLPYTFGGGTKLEITGGGGSGGGGSGGGGSEVKLQESGPGLVAPSQSLSVTCTVSGVSLPDYGVSWIRQPPRKGLEWLGVIWGSETTYYNSALKSRLTIIKDNSKSQVFLKMNSLQTDDTAIYYCAKHYYYGGSYAMDYWGQGTSVTVSSTTTPAPRPPTPAPTIASQPLSLRPEACRPAAGGAVHTRGLDFACDIYIWAPLAGTCGVLLLSLVITLYCKRGRKKLLYIFKQPFMRPVQTTQEEDGCSCRFPEEEEGGCELRVKFSRSADAPAYKQGQNQLYNELNLGRREEYDVLDKRRGRDPEMGGKPRRKNPQEGLYNELQKDKMAEAYSEIGMKGERRRGKGHDGLYQGLSTATKDTYDALHMQALPPR

SEQ ID NO: 419 - DNA, 2244 bp, Artificial Sequence
  Description of Artificial Sequence: Synthetic Construct
atggccttaccagtgaccgccttgctcctgccgctggccttgctgctccacgccgccaggccgggatcctcactggcgctcagccttactgccgaccaaatggtatcagctcttctggacgcagaacccccaattctttattccgagtacgaccccacacgcccgttcagtgaagcttccatgatgggcctccttacgaaccttgccgaccgggaactcgtgcacatgatcaattgggcgaagcgggtgccggggttcgtagatttgacacttcacgaccaagttcatctcttggaatgtgcttggatggagatattgatgatcggactcgtgtggaggtcaatggagcatcctggtaaacttcttttcgcacccaatctgctcttggatagagatcagggtaagtgcgtcgagggtggcgttgaaatcttcgacatgctccttgcgacatccagccgattccgaatgatgaatcttcaaggagaggaatttgtctgtcttaagagcattatactcctcaatagtggagtttacaccttcttgtcctctacactgaaatcacttgaggaaaaagatcacatacatagggtgttggataaaatcacggatacactcatacatctgatggcaaaagcaggattgaccctgcaacagcagcaccaacgactggcccaactgctgttgatccttagccatatcagacacatgtctaacaaaaggatggaacatttgtacagcatgaaatgtaagaacgtagtgccactgtccgatttgttgctggaaatgctggacgctcatcggctcggatccgagtccaggagagtgcggcgcaacaagaggagcaaggacatccagatgacacagactacatcctccctgtctgcctctctgggagacagagtcaccatcagttgcagggcaagtcaggacattagtaaatatttaaattggtatcagcagaaaccagatggaactgttaaactcctgatctaccatacatcaagattacactcaggagtcccatcaaggttcagtggcagtgggtctggaacagattattctctcaccattagcaacctggagcaagaagatattgccacttacttttgccaacagggtaatacgcttccgtacacgttcggaggggggaccaagctggagatcacaggtggcggtggctcgggcggtggtgggtcgggtggcggcggatctgaggtgaaactgcaggagtcaggacctggcctggtggcgccctcacagagcctgtccgtcacatgcactgtctcaggggtctcattacccgactatggtgtaagctggattcgccagcctccacgaaagggtctggagtggctgggagtaatatggggtagtgaaaccacatactataattcagctctcaaatccagactgaccatcatcaaggacaactccaagagccaagttttcttaaaaatgaacagtctgcaaactgatgacacagccatttactactgtgccaaacattattactacggtggtagctatgctatggactactggggccaaggaacctcagtcaccgtctcctcaaccacgacgccagcgccgcgaccaccaacaccggcgcccaccatcgcgtcgcagcccctgtccctgcgcccagaggcgtgccggccagcggcggggggcgcagtgcacacgagggggctggacttcgcctgtgatatctacatctgggcgcccttggccgggacttgtggggtccttctcctgtcactggttatcaccctttactgcaaacggggcagaaagaaactcctgtatatattcaaacaaccatttatgagaccagtacaaactactcaagaggaagatggctgtagctgccgatttccagaagaagaagaaggaggatgtgaactgagagtgaagttcagcaggagcgcagacgcccccgcgtacaagcagggccagaaccagctctataacgagctcaatctaggacgaagagaggagtacgatgttttggacaagagacgtggccgggaccctgagatggggggaaagccgagaaggaagaaccctcaggaaggcctgtacaatgaactgcagaaagataagatggcggaggcctacagtgagattgggatgaaaggcgagcgccggaggggcaaggggcacgatggcctttaccagggtctcagtacagccaccaaggacacctacgacgcccttcacatgcaggccctgccccctcgctaa

SEQ ID NO: 420 - protein, 747 aa, Artificial Sequence
  Description of Artificial Sequence: Synthetic Construct
MALPVTALLLPLALLLHAARPGSSLALSLTADQMVSALLDAEPPILYSEYDPTRPFSEASMMGLLTNLADRELVHMINWAKRVPGFVDLALHDQVHLLECAWMEILMIGLVWRSMEHPGKLLFAPNLLLDRNQGKCVEGGVEIFDMLLATSSRFRMMNLQGEEFVCLKSIILLNSGVYTFLSSTLKSLEEKDHIHRVLDKITDTLIHLMAKAGLTLQQQHQRLAQLLLILSHIRHMSSKRMEHLYSMKCKNVVPLSDLLLEMLDAHRLGSESRRVRRNKRSKDIQMTQTTSSLSASLGDRVTISCRASQDISKYLNWYQQKPDGTVKLLIYHTSRLHSGVPSRFSGSGSGTDYSLTISNLEQEDIATYFCQQGNTLPYTFGGGTKLEITGGGGSGGGGSGGGGSEVKLQESGPGLVAPSQSLSVTCTVSGVSLPDYGVSWIRQPPRKGLEWLGVIWGSETTYYNSALKSRLTIIKDNSKSQVFLKMNSLQTDDTAIYYCAKHYYYGGSYAMDYWGQGTSVTVSSTTTPAPRPPTPAPTIASQPLSLRPEACRPAAGGAVHTRGLDFACDIYIWAPLAGTCGVLLLSLVITLYCKRGRKKLLYIFKQPFMRPVQTTQEEDGCSCRFPEEEEGGCELRVKFSRSADAPAYKQGQNQLYNELNLGRREEYDVLDKRRGRDPEMGGKPRRKNPQEGLYNELQKDKMAEAYSEIGMKGERRRGKGHDGLYQGLSTATKDTYDALHMQALPPR

SEQ ID NO: 421 - DNA, 2244 bp, Artificial Sequence
  Description of Artificial Sequence: Synthetic Construct
atggccttaccagtgaccgccttgctcctgccgctggccttgctgctccacgccgccaggccgggatcctcactggcgctcagccttactgccgaccaaatggtatcagctcttctggacgcagaacccccaattctttattccgagtacgaccccacacgcccgttcagtgaagcttccatgatgggcctccttacgaaccttgccgaccgggaactcgtgcacatgatcaattgggcgaagcgggtgccggggttcgtagatttggcacttcacgaccaagttcatctcttggaatgtgcttggatggagatattgatgatcggactcgtgtggaggtcaatggagcatcctggtaaacttcttttcgcacccaatctgctcttggatagaaatcagggtaagtgcgtcgagggtggcgttgaaatcttcgacatgctccttgcgacatccagccgattccgaatgatgaatcttcaaggagaggaatttgtctgtcttaagagcattatactcctcaatagtggagtttacaccttcttgtcctctacactgaaatcacttgaggaaaaagatcacatacatagggtgttggataaaatcacggatacactcatacatctgatggcaaaagcaggattgaccctgcaacagcagcaccaacgactggcccaactgctgttgatccttagccatatcagacacatgtctagcaaaaggatggaacatttgtacagcatgaaatgtaagaacgtagtgccactgtccgatttgttgctggaaatgctggacgctcatcggctcggatccgagtccaggagagtgcggcgcaacaagaggagcaaggacatccagatgacacagactacatcctccctgtctgcctctctgggagacagagtcaccatcagttgcagggcaagtcaggacattagtaaatatttaaattggtatcagcagaaaccagatggaactgttaaactcctgatctaccatacatcaagattacactcaggagtcccatcaaggttcagtggcagtgggtctggaacagattattctctcaccattagcaacctggagcaagaagatattgccacttacttttgccaacagggtaatacgcttccgtacacgttcggaggggggaccaagctggagatcacaggtggcggtggctcgggcggtggtgggtcgggtggcggcggatctgaggtgaaactgcaggagtcaggacctggcctggtggcgccctcacagagcctgtccgtcacatgcactgtctcaggggtctcattacccgactatggtgtaagctggattcgccagcctccacgaaagggtctggagtggctgggagtaatatggggtagtgaaaccacatactataattcagctctcaaatccagactgaccatcatcaaggacaactccaagagccaagttttcttaaaaatgaacagtctgcaaactgatgacacagccatttactactgtgccaaacattattactacggtggtagctatgctatggactactggggccaaggaacctcagtcaccgtctcctcaaccacgacgccagcgccgcgaccaccaacaccggcgcccaccatcgcgtcgcagcccctgtccctgcgcccagaggcgtgccggccagcggcggggggcgcagtgcacacgagggggctggacttcgcctgtgatatctacatctgggcgcccttggccgggacttgtggggtccttctcctgtcactggttatcaccctttactgcaaacggggcagaaagaaactcctgtatatattcaaacaaccatttatgagaccagtacaaactactcaagaggaagatggctgtagctgccgatttccagaagaagaagaaggaggatgtgaactgagagtgaagttcagcaggagcgcagacgcccccgcgtacaagcagggccagaaccagctctataacgagctcaatctaggacgaagagaggagtacgatgttttggacaagagacgtggccgggaccctgagatggggggaaagccgagaaggaagaaccctcaggaaggcctgtacaatgaactgcagaaagataagatggcggaggcctacagtgagattgggatgaaaggcgagcgccggaggggcaaggggcacgatggcctttaccagggtctcagtacagccaccaaggacacctacgacgcccttcacatgcaggccctgccccctcgctaa

SEQ ID NO: 422 - protein, 747 aa, Artificial Sequence
  Description of Artificial Sequence: Synthetic Construct
MALPVTALLLPLALLLHAARPGSNLALSLTADQMVSALLDAEPPILYSEYDPTRPFSEASMMGLLTNLADRELVHMINWAKRVPGFVDLTLHDQVHLLECAWMEILMIGLVWRSMEHPGKLLFAPNLLLDRNQGKCVEGGVEIFDMLLATSSRFRMMNLQVEEFVCLKSIILLNSGVYTFLSSTLKSLEEKDHIHRVLDKITDTLIHLMAKAGLTLQQQHQRLAQLLLILSHIRHMSNKRMEHLYSMKCKNVVPLSDLLLEMLDAHRLGSESRRVRRNKRSKDIQMTQTTSSLSASLGDRVTISCRASQDISKYLNWYQQKPDGTVKLLIYHTSRLHSGVPSRFSGSGSGTDYSLTISNLEQEDIATYFCQQGNTLPYTFGGGTKLEITGGGGSGGGGSGGGGSEVKLQESGPGLVAPSQSLSVTCTVSGVSLPDYGVSWIRQPPRKGLEWLGVIWGSETTYYNSALKSRLTIIKDNSKSQVFLKMNSLQTDDTAIYYCAKHYYYGGSYAMDYWGQGTSVTVSSTTTPAPRPPTPAPTIASQPLSLRPEACRPAAGGAVHTRGLDFACDIYIWAPLAGTCGVLLLSLVITLYCKRGRKKLLYIFKQPFMRPVQTTQEEDGCSCRFPEEEEGGCELRVKFSRSADAPAYKQGQNQLYNELNLGRREEYDVLDKRRGRDPEMGGKPRRKNPQEGLYNELQKDKMAEAYSEIGMKGERRRGKGHDGLYQGLSTATKDTYDALHMQALPPR

SEQ ID NO: 423 - DNA, 2244 bp, Artificial Sequence
  Description of Artificial Sequence: Synthetic Construct
atggccttaccagtgaccgccttgctcctgccgctggccttgctgctccacgccgccaggccgggatccaatctggcgctcagccttactgccgaccaaatggtatcagctcttctggacgcagaacccccaattctttattccgagtacgaccccacacgcccgttcagtgaagcttccatgatgggcctccttacgaaccttgccgaccgggaactcgtgcacatgatcaattgggcgaagcgggtgccggggttcgtagatttgacacttcacgaccaagttcatctcttggaatgtgcttggatggagatattgatgatcggactcgtgtggaggtcaatggagcatcctggtaaacttcttttcgcacccaatctgctcttggatagaaatcagggtaagtgcgtcgagggtggcgttgaaatcttcgacatgctccttgcgacatccagccgattccgaatgatgaatcttcaagtagaggaatttgtctgtcttaagagcattatactcctcaatagtggagtttacaccttcttgtcctctacactgaaatcacttgaggaaaaagatcacatacatagggtgttggataaaatcacggatacactcatacatctgatggcaaaagcaggattgaccctgcaacagcagcaccaacgactggcccaactgctgttgatccttagccatatcagacacatgtctaacaaaaggatggaacatttgtacagcatgaaatgtaagaacgtagtgccactgtccgatttgttgctggaaatgctggacgctcatcggctcggatccgagtccaggagagtgcggcgcaacaagaggagcaaggacatccagatgacacagactacatcctccctgtctgcctctctgggagacagagtcaccatcagttgcagggcaagtcaggacattagtaaatatttaaattggtatcagcagaaaccagatggaactgttaaactcctgatctaccatacatcaagattacactcaggagtcccatcaaggttcagtggcagtgggtctggaacagattattctctcaccattagcaacctggagcaagaagatattgccacttacttttgccaacagggtaatacgcttccgtacacgttcggaggggggaccaagctggagatcacaggtggcggtggctcgggcggtggtgggtcgggtggcggcggatctgaggtgaaactgcaggagtcaggacctggcctggtggcgccctcacagagcctgtccgtcacatgcactgtctcaggggtctcattacccgactatggtgtaagctggattcgccagcctccacgaaagggtctggagtggctgggagtaatatggggtagtgaaaccacatactataattcagctctcaaatccagactgaccatcatcaaggacaactccaagagccaagttttcttaaaaatgaacagtctgcaaactgatgacacagccatttactactgtgccaaacattattactacggtggtagctatgctatggactactggggccaaggaacctcagtcaccgtctcctcaaccacgacgccagcgccgcgaccaccaacaccggcgcccaccatcgcgtcgcagcccctgtccctgcgcccagaggcgtgccggccagcggcggggggcgcagtgcacacgagggggctggacttcgcctgtgatatctacatctgggcgcccttggccgggacttgtggggtccttctcctgtcactggttatcaccctttactgcaaacggggcagaaagaaactcctgtatatattcaaacaaccatttatgagaccagtacaaactactcaagaggaagatggctgtagctgccgatttccagaagaagaagaaggaggatgtgaactgagagtgaagttcagcaggagcgcagacgcccccgcgtacaagcagggccagaaccagctctataacgagctcaatctaggacgaagagaggagtacgatgttttggacaagagacgtggccgggaccctgagatggggggaaagccgagaaggaagaaccctcaggaaggcctgtacaatgaactgcagaaagataagatggcggaggcctacagtgagattgggatgaaaggcgagcgccggaggggcaaggggcacgatggcctttaccagggtctcagtacagccaccaaggacacctacgacgcccttcacatgcaggccctgccccctcgctaa

SEQ ID NO: 424 - protein, 747 aa, Artificial Sequence
  Description of Artificial Sequence: Synthetic Construct
MALPVTALLLPLALLLHAARPGSSLALSLTADQMVSALLDAEPPILYSEYDPTGPFSEASMMGLLTNLADRELVHMINWAKRVPGFVDLTLHDQVHLLECAWMEILMIGLVWRSMEHPGKLLFAPNLLLDRNQGKCVEGGVEIFDMLLATSSRFRMMNLQGEEFVCLKSIILLNSGVYTFLSSTLKSLEEKDHIHRVLDKITDTLIHLMAKAGLTLQQQHQRLAQLLLILSHIRHMSSKRMEHLYSMKCKNVVPLSDLLLEMLDAHRLGSESRRVRRNKRSKDIQMTQTTSSLSASLGDRVTISCRASQDISKYLNWYQQKPDGTVKLLIYHTSRLHSGVPSRFSGSGSGTDYSLTISNLEQEDIATYFCQQGNTLPYTFGGGTKLEITGGGGSGGGGSGGGGSEVKLQESGPGLVAPSQSLSVTCTVSGVSLPDYGVSWIRQPPRKGLEWLGVIWGSETTYYNSALKSRLTIIKDNSKSQVFLKMNSLQTDDTAIYYCAKHYYYGGSYAMDYWGQGTSVTVSSTTTPAPRPPTPAPTIASQPLSLRPEACRPAAGGAVHTRGLDFACDIYIWAPLAGTCGVLLLSLVITLYCKRGRKKLLYIFKQPFMRPVQTTQEEDGCSCRFPEEEEGGCELRVKFSRSADAPAYKQGQNQLYNELNLGRREEYDVLDKRRGRDPEMGGKPRRKNPQEGLYNELQKDKMAEAYSEIGMKGERRRGKGHDGLYQGLSTATKDTYDALHMQALPPR

SEQ ID NO: 425 - DNA, 2244 bp, Artificial Sequence
  Description of Artificial Sequence: Synthetic Construct
atggccttaccagtgaccgccttgctcctgccgctggccttgctgctccacgccgccaggccgggatcctcactggcgctcagccttactgccgaccaaatggtatcagctcttctggacgcagaacccccaattctttattccgagtacgaccccacaggcccgttcagtgaagcttccatgatgggcctccttacgaaccttgccgaccgggaactcgtgcacatgatcaattgggcgaagcgggtgccggggttcgtagatttgacacttcacgaccaagttcatctcttggaatgtgcttggatggagatattgatgatcggactcgtgtggaggtcaatggagcatcctggtaaacttcttttcgcacccaatctgctcttggatagaaatcagggtaagtgcgtcgagggtggcgttgaaatcttcgacatgctccttgcgacatccagccgattccgaatgatgaatcttcaaggagaggaatttgtctgtcttaagagcattatactcctcaatagtggagtttacaccttcttgtcctctacactgaaatcacttgaggaaaaagatcacatacatagggtgttggataaaatcacggatacactcatacatctgatggcaaaagcaggattgaccctgcaacagcagcaccaacgactggcccaactgctgttgatccttagccatatcagacacatgtctagcaaaaggatggaacatttgtacagcatgaaatgtaagaacgtagtgccactgtccgatttgttgctggaaatgctggacgctcatcggctcggatccgagtccaggagagtgcggcgcaacaagaggagcaaggacatccagatgacacagactacatcctccctgtctgcctctctgggagacagagtcaccatcagttgcagggcaagtcaggacattagtaaatatttaaattggtatcagcagaaaccagatggaactgttaaactcctgatctaccatacatcaagattacactcaggagtcccatcaaggttcagtggcagtgggtctggaacagattattctctcaccattagcaacctggagcaagaagatattgccacttacttttgccaacagggtaatacgcttccgtacacgttcggaggggggaccaagctggagatcacaggtggcggtggctcgggcggtggtgggtcgggtggcggcggatctgaggtgaaactgcaggagtcaggacctggcctggtggcgccctcacagagcctgtccgtcacatgcactgtctcaggggtctcattacccgactatggtgtaagctggattcgccagcctccacgaaagggtctggagtggctgggagtaatatggggtagtgaaaccacatactataattcagctctcaaatccagactgaccatcatcaaggacaactccaagagccaagttttcttaaaaatgaacagtctgcaaactgatgacacagccatttactactgtgccaaacattattactacggtggtagctatgctatggactactggggccaaggaacctcagtcaccgtctcctcaaccacgacgccagcgccgcgaccaccaacaccggcgcccaccatcgcgtcgcagcccctgtccctgcgcccagaggcgtgccggccagcggcggggggcgcagtgcacacgagggggctggacttcgcctgtgatatctacatctgggcgcccttggccgggacttgtggggtccttctcctgtcactggttatcaccctttactgcaaacggggcagaaagaaactcctgtatatattcaaacaaccatttatgagaccagtacaaactactcaagaggaagatggctgtagctgccgatttccagaagaagaagaaggaggatgtgaactgagagtgaagttcagcaggagcgcagacgcccccgcgtacaagcagggccagaaccagctctataacgagctcaatctaggacgaagagaggagtacgatgttttggacaagagacgtggccgggaccctgagatggggggaaagccgagaaggaagaaccctcaggaaggcctgtacaatgaactgcagaaagataagatggcggaggcctacagtgagattgggatgaaaggcgagcgccggaggggcaaggggcacgatggcctttaccagggtctcagtacagccaccaaggacacctacgacgcccttcacatgcaggccctgccccctcgctaa

SEQ ID NO: 426 - protein, 1294 aa, Artificial Sequence
  Description of Artificial Sequence: Synthetic Construct
MALPVTALLLPLALLLHAARPDIQMTQTTSSLSASLGDRVTISCRASQDISKYLNWYQQKPDGTVKLLIYHTSRLHSGVPSRFSGSGSGTDYSLTISNLEQEDIATYFCQQGNTLPYTFGGGTKLEITGGGGSGGGGSGGGGSEVKLQESGPGLVAPSQSLSVTCTVSGVSLPDYGVSWIRQPPRKGLEWLGVIWGSETTYYNSALKSRLTIIKDNSKSQVFLKMNSLQTDDTAIYYCAKHYYYGGSYAMDYWGQGTSVTVSSTTTPAPRPPTPAPTIASQPLSLRPEACRPAAGGAVHTRGLDFACDIYIWAPLAGTCGVLLLSLVITLYCKRGRKKLLYIFKQPFMRPVQTTQEEDGCSCRFPEEEEGGCELRVKFSRSADAPAYKQGQNQLYNELNLGRREEYDVLDKRRGRDPEMGGKPRRKNPQEGLYNELQKDKMAEAYSEIGMKGERRRGKGHDGLYQGLSTATKDTYDALHMQALPPRGSATNFSLLKQAGDVEENPGPMCHQQLVISWFSLVFLASPLVAIWELKKDVYVVELDWYPDAPGEMVVLTCDTPEEDGITWTLDQSSEVLGSGKTLTIQVKEFGDAGQYTCHKGGEVLSHSLLLLHKKEDGIWSTDILKDQKEPKNKTFLRCEAKNYSGRFTCWWLTTISTDLTFSVKSSRGSSDPQGVTCGAATLSAERVRGDNKEYEYSVECQEDSACPAAEESLPIEVMVDAVHKLKYENYTSSFFIRDIIKPDPPKNLQLKPLKNSRQVEVSWEYPDTWSTPHSYFSLTFCVQVQGKSKREKKDRVFTDKTSATVICRKNASISVRAQDRYYSSSWSEWASVPCSGGGGSGGGGSGGGGSRNLPVATPDPGMFPCLHHSQNLLRAVSNMLQKARQTLEFYPCTSEEIDHEDITKDKTSTVEACLPLELTKNESCLNSRETSFITNGSCLASRKTSFMMALCLSSIYEDLKMYQVEFKTMNAKLLMDPKRQIFLDQNMLAVIDELMQALNFNSETVPQKSSLEEPDFYKTKIKLCILLHAFRIRAVTIDRVMSYLNASGSSLALSLTADQMVSALLDAEPPILYSEYDPTRPFSEASMMGLLTNLADRELVHMINWAKRVPGFVDLTLHDQVHLLECAWMEILMIGLVWRSMEHPGKLLFAPNLLLDRNQGKCVEGGVEIFDMLLATSSRFRMMNLQGEEFVCLKSIILLNSGVYTFLSSTLKSLEEKDHIHRVLDKITDTLIHLMAKAGLTLQQQHHRLAQLLLILSHIRHMSNKRMEHLYSMKCKNVVPLSDLLLEMLDAHRL

SEQ ID NO: 427 - DNA, 3885 bp, Artificial Sequence
  Description of Artificial Sequence: Synthetic Construct
atggccttaccagtgaccgccttgctcctgccgctggccttgctgctccacgccgccaggccggacatccagatgacacagactacatcctccctgtctgcctctctgggagacagagtcaccatcagttgcagggcaagtcaggacattagtaaatatttaaattggtatcagcagaaaccagatggaactgttaaactcctgatctaccatacatcaagattacactcaggagtcccatcaaggttcagtggcagtgggtctggaacagattattctctcaccattagcaacctggagcaagaagatattgccacttacttttgccaacagggtaatacgcttccgtacacgttcggaggggggaccaagctggagatcacaggtggcggtggctcgggcggtggtgggtcgggtggcggcggatctgaggtgaaactgcaggagtcaggacctggcctggtggcgccctcacagagcctgtccgtcacatgcactgtctcaggggtctcattacccgactatggtgtaagctggattcgccagcctccacgaaagggtctggagtggctgggagtaatatggggtagtgaaaccacatactataattcagctctcaaatccagactgaccatcatcaaggacaactccaagagccaagttttcttaaaaatgaacagtctgcaaactgatgacacagccatttactactgtgccaaacattattactacggtggtagctatgctatggactactggggccaaggaacctcagtcaccgtctcctcaaccacgacgccagcgccgcgaccaccaacaccggcgcccaccatcgcgtcgcagcccctgtccctgcgcccagaggcgtgccggccagcggcggggggcgcagtgcacacgagggggctggacttcgcctgtgatatctacatctgggcgcccttggccgggacttgtggggtccttctcctgtcactggttatcaccctttactgcaaacggggcagaaagaaactcctgtatatattcaaacaaccatttatgagaccagtacaaactactcaagaggaagatggctgtagctgccgatttccagaagaagaagaaggaggatgtgaactgagagtgaagttcagcaggagcgcagacgcccccgcgtacaagcagggccagaaccagctctataacgagctcaatctaggacgaagagaggagtacgatgttttggacaagagacgtggccgggaccctgagatggggggaaagccgagaaggaagaaccctcaggaaggcctgtacaatgaactgcagaaagataagatggcggaggcctacagtgagattgggatgaaaggcgagcgccggaggggcaaggggcacgatggcctttaccagggtctcagtacagccaccaaggacacctacgacgcccttcacatgcaggccctgccccctcgcggatcagctactaacttcagcctgctgaagcaggctggagacgtggaggagaaccctggacctatgtgccaccaacagctcgtgatcagctggttctccctggtgttcctggctagccccctggtggccatctgggagctcaagaaagacgtgtacgtggtggaactggactggtaccccgacgcccctggcgaaatggtggtgctgacatgcgacacccctgaggaggatggcattacctggaccctcgatcagagctccgaggtgctgggcagcggcaaaaccctgaccatccaggtgaaggagtttggcgatgccggccagtacacatgtcacaagggcggcgaggtgctgagccactccctgctgctgctccacaagaaggaagatggcatctggagcaccgacattctgaaggatcagaaggagcccaagaacaagacattcctgaggtgtgaggccaagaactacagcggcaggtttacctgctggtggctgacaacaatcagcaccgacctcacattctccgtcaagtcctccaggggttcttccgaccctcaaggcgtgacatgcggcgctgccaccctgagcgctgagagagtcaggggcgacaacaaggagtacgagtacagcgtcgaatgtcaggaggacagcgcctgtcccgccgctgaagagagcctgcctatcgaggtgatggtggacgccgtgcacaaactgaagtatgagaattacacctccagcttcttcatcagggacatcatcaaacccgatccccccaagaacctgcagctgaagcctctgaagaacagcagacaggtcgaagtgtcctgggagtaccctgatacctggtccacaccccacagctacttcagcctgaccttttgcgtgcaggtgcagggcaagagcaaaagggagaagaaggacagggtgtttaccgacaagacctccgccacagtgatttgcagaaagaacgcctccatcagcgtgagggcccaggacaggtattacagcagctcctggagcgaatgggctagcgtgccctgtagcggaggaggaggcagcggaggaggaggttctggaggaggcggcagcagaaacctgcctgtcgctacccccgaccccggaatgttcccctgcctgcaccactcccagaacctcctgagggccgtgtccaacatgctgcagaaggctagacagaccctcgaattctacccctgtaccagcgaggagatcgaccatgaggacatcaccaaggataagaccagcaccgtggaggcttgcctgcctctggagctgaccaaaaacgagagctgcctgaacagcagggaaaccagcttcattaccaacggctcctgcctggcctccaggaagacatccttcatgatggccctgtgcctcagcagcatctacgaggacctgaagatgtatcaggtggagtttaagaccatgaatgccaagctgctgatggaccctaagaggcagatcttcctggaccagaatatgctggccgtgattgacgagctgatgcaggccctcaactttaacagcgagaccgtgccccagaaaagcagcctcgaagagcctgacttctacaaaaccaagattaagctgtgtatcctgctgcacgccttcaggatcagggccgtgaccatcgacagggtgatgagctacctgaacgccagcggatcctcactggcgctcagccttactgccgaccaaatggtatcagctcttctggacgcagaacccccaattctttattccgagtacgaccccacacgcccgttcagtgaagcttccatgatgggcctccttacgaaccttgccgaccgggaactcgtgcacatgatcaattgggcgaagcgggtgccggggttcgtagatttgacacttcacgaccaagttcatctcttggaatgtgcttggatggagatattgatgatcggactcgtgtggaggtcaatggagcatcctggtaaacttcttttcgcacccaatctgctcttggatagaaatcagggtaagtgcgtcgagggtggcgttgaaatcttcgacatgctccttgcgacatccagccgattccgaatgatgaatcttcaaggagaggaatttgtctgtcttaagagcattatactcctcaatagtggagtttacaccttcttgtcctctacactgaaatcacttgaggaaaaagatcacatacatagggtgttggataaaatcacggatacactcatacatctgatggcaaaagcaggattgaccctgcaacagcagcaccaccgactggcccaactgctgttgatccttagccatatcagacacatgtctaacaaaaggatggaacatttgtacagcatgaaatgtaagaacgtagtgccactgtccgatttgttgctggaaatgctggacgctcatcggctctga
